United States Patent Application Publication US 2015/0086982 A1 - sequence listing, part 8

SEQ ID NO: 108 - DNA, 1841851 bp, Scheffersomyces stipitis
gcaagacgtgaaaagatccataccgcaagacgtgaaaagatccataccgcaagacgtgaaaagatccataccgcaagacgtgaaaagatccataccgcaagacgtgaaaagatccataccgcaagacgtgaaaagatccataccgcaagacgtgaaaagatccataccgcaagacgtgaaaagatccataccgcaagacgtgaaaagatccataccgcaagacgtgaaaagatccataccgcaagacgtgaaaagatccataccgcaagacgtgaaaagatccataccgcaagacgtgaaaaagatccataccgcaagacgtgaaaagatccataccgcaagacccgtgccgctattatacatccgtgccgcaactattaactcacacgcctttggtcacgttatggcctatttgggtcgcctcactaaacttccgtgcctcaaccaatatctcgaatcagtggtcacgttatgtcctgcccgtgcaacaatcctaatatcacatatccttggtcacgttacaaatgtcctatttgggtctgttccatacaggactgctggtcgaactgatctaaccatatctccgctgcagcaatagatacgaatcttgtcaggtcacgtgaaagacgctttttccgcgaatcggtacaggtcgctcacattccttcctcgcatagaataccgcaatacttatgaaaatgagataacatggaccctaggaatgtccagctattgaggactatgaattgttcataccttatatcttcttatattatgttattccctaaaaatcaagaatatcccccttcaaatgaaccatactttgtttaattataaactttaataattttttcaatctttggggatctcgcctctcttttatacctctcagatctcattttggtgatacacgcacatcaaatgcgcctatatttgtatccacgtctatattgactgcacataactctctgtcaatcaattctagtcatgtgattctaaatggataatcctccctccaaattcacaacaactcaatataatacaacccaatataatacaatatcactttcacattaatcctacatcatgatatccacaataactaacattaaatatccatattcttacaatcttaacttttcccttacctttattacttctctcaattttcttgtatacttgtactgattgtctttctgaaaagaatgcgaaaaatactacaaaaatactaattgctgccaaaaattgcacctgtcctaaaagtagtaccattcgattaccttcattcaattaagtaaggattcatcatcttcaagtgttacaaaattctaatgctctaattataaccatttgaaataaggatacatcatcctctgtcacatggtataacacgtaaatattgcaacacaaatgtcgccaaaatgacgtgacagcacgacatttaccatatttataaattagtaacaatgttcaccatatggcgtaattgtgatggttggtcgtacctaaggcgaatatagacgtatattctgattaagagaattacattggaatagtcagaatccagtgaaaatatatcacgatggactctcgcctggcgatgggccgcatatttaaaatttagcgactagcctcctctgggtgtcatcaaccggaacaattaaattattccaagaaaggatttaagatttaacacctcgatcacgctatagttacggcctgcaagtaatttatgaatttttcctgattaggataaaccctaaactctttgtataaatggcccaaattcccacttttctgctttatttttttattaacaatcaatctcttttataattgaaggacacagtggcgactttagttaaaacttcaaaatcatcctccagactttccagtgttcaaattagttattatcgtatactaaaagtagaatgagtactcaagcaccaggctattcaagtcataatccaataactttggatctggatctgaacctggacctggacctggaccagaactttgaagatgctctagacgatttcagtaaagtagatatcaaatgtgaaaattccaatctcgtctctaccgatgagcatatttggtcgagccctcaatcgttaaggcggagcctgccatgttcttcaatgcaaactactccagcgagtgtgtaatctcgtacgacattaatcatacatcatttaaaagtatcgtcagagaatgttcattacattcctacctaaggtggtcttggaattatactctgattaaaaggatcccattggacagtcggaaactagtaaaaacttttcacgattgactcttacttgcaacttaacgtatgttaagcgactagccatctcttggttcatcaatcggaacaaacaacgagccacctaggttcatttatgggaaaaaatagacagctatgaaaggatttaagattaggcgcctcgttaacgtcaatgttacagtttgctagtaatttacatattattaccgattaggacaattccgtgaagtctctgtatgtgcgaggtgtgtggtacccctgtcactgttaatttgaatctacttcctcaaattaatgaatggatttcccgtcaacggatcttgagatcatgaattttctgtgcagcaatatgcatccttaggtagacaacgtcttattgcatatgccaaaatgtaaacatcgttcccctctaaaataatgtctatgtactgcagattaaaatggaaaatcttaatccagttcgcagccaaaaattttttcggattttccgcagtgacacttttcttgacggaaaatcaatccatttatttggaagcgggataagaaaggttacccatatgaatgttccactgcctaggaaaggtcctttacattgatacctgaaatctggggttatcttcttatgatggaactatataatgcgcaagaaaatactgcaagaagcccaaatctaattccaacttcaaattgatgctacagcaagccaatatgccgtatacaactatctcttctagacagcttttgaaaaaggaacttgatcccattcttcagaatggaacgagtttagataataaaactcatgctccggggattatttatggtgttacaaatgagaaagaaaccgtctacttgaatcattctggatatctcaacctggaaacaaaggactctgttaacaacgattccaaatttgccatgttatcggctacaaagccaatttcgacattggctattcttcaattagttgatcgtaatttggttgacttggacactccagttgagaaatacctacctaggtttgcttctgttgcaatttttaaaggtggaaacggtgataaagctttttcaaagccaaaaaagaaggcaactctccgacaattattgacacacacagcaggtttcgcttacagtttcactaacaaggattatcttgaaaccctattaagtactgggcaaccaaatttatttggcagcgacacctccacatttgatgcaacttatcttacttttgagccaggaactgattggagctatggtatgggtttagattgggctggattggttttagaagaagttacgggtctttccctaggggaattcattaggatcaacatactagaaccagccaagatgaacaacaccactttcaaagtgaccaaatctgaaaagaatcttatgcttatacacgttcgagatgacaatcgtatgaaagtctttgatctccaatatcctcgtgaatccaaaattgatatggcaggacatggattgtttggtactgttgacgactacctcaagtttattagaatttggttaaacaagggtaaaacggaagaaggtgttcagcttattagtgaacaactctgggaaattgcagttcagaacaatttgcctaaaggcactacaattaagaacttggatgcttttcaagagaacttgtgtggtccaattgtatttcctccagactgctcttggagtttaggattctgtagaaatggttctgatttccacactggaagaaagagtggatctctttggtggtgtggtgtttcaaattgctacctttggatagatttgaagagcaaattgggaggcttctatgcgacacaagtattcccatatggtgatccatctagtgaaacaaattatgtcttagaaaaagctgtttatgacaatttgaaataatttggtcttaatttttatttgatttatttttattatgattattaattcaatatcgtgtagtatatatataagttctaaattttacttacaatagtcaatattcatttaagaaatgtagtgggttctgcaaagaatgctcactaatgtcagtatctgttattgacaaatctccatgaaaatcaggaataggatcaccgaataattcttcaatgtatgtctcaatattcatatcaactgttgcattcttcgtagatttcgcttcattgttttgagtggaagttatggggttgtcaaattcaaggaatagttcgttcgaatcatctacagtttcgaacgttttttctattgaacatttcatttttgttaatatatcagagaatttctctgacacaggactcaaacgaccataatatttcgttatgtaggtcccaacatttagcatttctcttaaaaacaggattgaataactatcactgtaatcaacatcaattcttctatggagaatagagagacccaatatcaatgaagccataaagcaacaatggacagttgtgtacagctcaactctgggatatttgtggtttttcaaataatggaaagttaatttaatagtaagcacagatgcttgtatgctagaagttaagaaattctgcattgcattcatctccttgattctcttccaaaatgaatcgttacatctctttgaatctgtattcttgaaagcaatattaactaggaaagtttttccaagtaacattctcccgtacaagtgggattgatgaactagcaatacaacataatcatcggaccatttagaactattctgaagctcaaacaatttggcttccagaccgacgccgctctcggtttttgcctcatcatctactttcaatatattactggttctgaggtcttcgggtagttgcagaattagcaagtttagttctgtagtcaatttctctgcctcggaagttttcatcatctcttcataataaagactatggacgatctttccatttaccttggctgattttccaacttcaaataaacctttcaaacggtgcttctgctcgattttgcagttaggatcattgagatagtcgctctcgaaatcatcccaatcgtaatcatttataatgagtggtctacccagtagaattgatgatatcctatcgcaaacaaacaagctcaaccaaagtttccttctatggtttatgtaggagttgtctttgaatgattcattaatattcttccggtgtaagcctaatgcttgggcatttcttattgcattccctaatgtcaaccacgaggaactccgcttataagtagattgataataaaagtaaatcaagaagtttgcttctatcatccaaaattttccatcgtcgatagacaatttcataagactatagccgctttgaaagaatgattctgaattaacagaatatctctccaattcgtcaataatatcgctcttggccccttcagcaaataagaatcctaatgctagaactaaatgcaacaaacacattttctcagtagttgctccaattggattatcatagatgtagtcaactatgttcgatctgagataatccatatcaaaaacgtaccaagtttgattaatatttacctcaaagtatttaatcaagatgttacagtattcccgctttggtaattgaagaggcgtcacattcttaacactagcctgttcatcaacgtagcacatgtcctttacatcgaaaataaattcacaattaccaattgtactaagaaatataaatctggactcaaatagtagagaaagtggactactttcaccaatatactgtgaattatccattttgaatgaaaatttgataattgatccatagtcgggaactttttcgatctgactaatctcatcatgtaaatttctagatttataactagagacgaagttgttcaagtctttactgcaaacatcatcctggttccatgagtggggaagttttgattgatctgtgttgttgatttttttttggaatgatgacaataggtgagaaaatgcagatttttgtgagaattcgagagatttcgaatagttggtacttttcacttcgatctctttggaactttgaaaagtgggtgcttgaatgctaacattacaaactttggcccttttcaatccattcccaactcttctatctgcaaatgagaatttacattcgatattcctcttgctgcataactcacagggagattttcctccacatttgaactttctcttcttgcagtaatcgcaagctgtggttactttcttcctcgacttcaacgccagtggtgacgtcattatattggtccatttggtttctgtcatgcttaaactcattagtgtttgacaacttcaaacgttgtgatctataatgaaatgaacagataatcgaacatttttaaatcgggcatcttgatagactagcggagtatgcatgttttgattacgtcagcccacactttgtggggtaaactgtaattagagatgtttctgaggggcactggtgaaagaaaaaaagaaacttaacaaatcatccgcattgcaattacggcgctgatggttagtagactacaagaaggtttcatcatcctttgatagggttcaaatagtccacatgaaagtacaacggtagctccgcgagaatggggagttacagcatttgtaaccttttgcagtagaaataaggatacgatttgctattcgattgatagtagatatcttttcgatcggctcggtcttggaactaccatggcttctcttttgaaacaacgcggacgggttacggctatctttgaggcaaatattcttttcggctataaccaaatcatgatggcattaataatgtaggacaattctttccttaactggccaaatgtggagaccctcttcattgctcaacatattcaacaaaagcctgtatgtagcagaatgcctaattgagtttttccattgggttttcatatccgctatcagctatgttccgagacttgattgctatatgcaggcggaacagctttctacactttgaagtaaatgacgaattcggattttccgtcaagagtaagaacggctctgaagtttcaaattccaacataagatctccacttgtcgtgaattgtggagaatcctatctgaaaaatagagagagccctattcaatttacaatgtacatcgtagcggaaaatcactggaacttcgaaaataggcatccatatacttcagcttgatttttatatgcaaaactattgcaatcaattgatcttttgcaacctactattagtttcatagcggcattattgaatgccacaagccaatttgtggggccaataaaagttgaaattgtataaataaacaagattatgctgattaaacttaacatatatttgagaattcactacttacaagcatttaacttgaagaatatcaaactataattataaactatgattcactacgatcaaattgttgttggagggggattcggcggtatgaccactttgcacaagcttcgtgaaaaagggttcaatgttcacggttttgaaagaggttctgattttggcggggtttggcaccacaacagatatcctggcgcaagagtcgactctgaaacaccagtttaccaactttggttgaaagaagtattatcggattttattttcacccaaaggttccctgactggaaagagcttcagaaatacttcaagtatgctggcgaaaaattgaaattgtacgactatttcaccatgaatactgaagtgactgctagtcattggaatgataaagaaagtttgtggtatgtttctactcaatcaaatctcaatggagttgagctgaaatttacatgtaatcacttaattctctgtattggttttgcagctaagaagacttatcctgatcttgaaggaagaggtacctttcagggaacttctttccacactgctgattggccatgggatgggattgatgttaaaggaaaaaaggttgctgttattggtactggagcttcaggggtacaagttattcaatccatctctaaagaggttggagaattagttgttttccagagaactccaaacttggttttaccaatgcaatctcaagaagctgatatatctagacaaaaggaaagaaaggaggcatatcatcaaatattcaatgatctgatcccatcctctttttcaggatttgaatttgaaccggacacaagatcggggaaggattgtactccagaagagatcaaggagaagtttgatgactgctggaagaacggtggctttagattttggttaggaaactttcaagatattatggttgataagtctactaatagagcagcttgggactactggaaggagaaatcttcagttagggttaaagaccctagaaaaaggaagattttggtccctgatgaaccaccacactacattttcactaagcgtccttgcctcgaaaccacctattttgaaagttataatagggaaaatgttgacattgtggatatcaacacaaatccaattactgaagtaactgaaaatggtctcataactaaggatggatcatgttatgaatttgacattattatatatgcaacggggtttgacgccatcactggggggttctatcagatggacttgaagggaaaaaatggtatcaccatttcggaagcttgggaaaatggaacatatacctacttaggaatgagtatcagtcagtttcccaacctatacttcctctatggtcctcaggggccaactgcattctgtaatggacccacttgtgccttgatacaaggagtctggatatcagagttgattgatttcaccactaaacatggtttcaaatacaacaccccaaccatcgaagctcagaatagctggaggaagtatatccaagataatgctaaccaaactcttttgccatacacaagaagctggtatatgggagcaaacagggatggcaacaaaccaagagaatgcttattgtatgtccgtggagttggaaactacttcaaggatattaataaagaatccaatatgggttatccaaacttcgtttttgtaaggtgagaccttttttcttttttttttagaatctatgtgaattgaaataagtacttgttttgaatcattttcttctgcatattatttgcgctgctattgtgaaattgcaaaattgcacagtagcagtataaactatataacaactctgaaggaaaattgtttatacgaattatatcttactgtcacagttttagagtagttttaaaccatcataatcagaatacttatgtttttaagatggatgattaaataactcaatctagaatttaatttcttgttaccaccattcgttgaatatctaatgtaatcctcactttccccggccaataggacaataaaattcaacatagagtgacaataacacatttacgctaatcctgtatcgtgttatcagtattagcttacctatgtttccatttttctgcaatctaaacttttcctcacttcaatcagtcttctaattacttgtgaataagtactgcttgtctttatgaaaagagtgcgaaaaaaattataaaaatataattgttgcaaaaaattccactcgctttaaaagtagtaccattcgattacgctcattcaattaaccaagtattcatattctttgagtcttacaaaattttaaagttctagttatagccattcaaagtatggtaacatggtccttggtcacaagacacaacacgtgaacataatccgtaatgggaagtagtagtaacatacaggtctttaatttatatatactgctggaaccaaattttcgtataaatgaagagttaaattaaattatatattggaaatagttggtattaataggggctatatatacctttggtagacccctgttttggtatggaatttagaacattgcgccaaactctgtttaatatgagtagatccaaagaagagatgttcctgcataatttccattaatccaacagaggatttaagagtcaacattacaatctgcaactaatttatgaattaatcccgattccctaaactccctgtataaatgacacaaaataccactttttctttggaataacaatattattaatagttaatatctttttgaattcaatcagcattgacttctaacaccaacttagttccagaaccttccagtattcaaatctagctctcttagccattgtcgaatagttaaatccccacccaaagtccagaacagctgcttgacataaaatggccagagcaaatatcaaggttgtgggtactatggcagaagccacggtaggtcatcagtcccaagcttcaaccgtttagtttgcatattctattagcaacccaattggattgcttgttgccagtgcattgagcagtagaaaggaagagatgttgttgctcaacaattattcctttgagtttagccaagaattattgaacaattgtgttaactaaatatcaacaagacacaagcgtttaacggaagaaacttgctatgatgctggtaagtagcgatgccatgtttgtgtcaaaaaaaaaagaagaagacttgcttgaagtatttgaagttcgtttgtaggtccagttgattgattacctaccagaccaaaaagctcacatgtagaccaatgcatagactcttggtaaaactgcatctacttgtgaactacatattgtcaatctattgtttcggtaatgcgccattgctttttcgggcccgctactttgcagaatttaaacataatctcttatgctatatttcgcactcatagaaaagcagtagttaagccccatgaaatggtacctaggtatattggcccgtttcaaagcgatgaccgaatttgtaaacctaggtgcaaaagcttcacgcgaacaacagccataatgtctttgaatgtaatggtgagctagcaccagacacatcaaaacacacagaggtgtttccaaaaatgaaaacttcacaaacgagattgtatgaatgatttcacaaaagctgcttgcgtaagctgtacttaggagcaccattatagcctgactatgcaaggcacgtaatttatacctttcatgaaatttaccatgcgtactgtgtggaatagaagcgaaaattagaattatcatatgaattcaatgaatattaacttgctagagccatgcatgaaatgaaccaatttccatattgagaactcccactgtcatgtgactaatacaaagaaattcacagtagtttgagttacttactttcaatcttggaatattaattagttttctatgctgctatattatggaaaggtcagtcttccctatctttaaaaacatgaagtaaaatatcccgagtctgctcgaagtagaagttctttcagtatctaccctggactcttggtaggccatactagtaaagaatattatcattacttgacgcagttatttttctaggaatatcaggagttatcaatgttgcctttttcattgaattaattacctagctgggatattctgtattagcaactagtaagtcacgtaattacctagtttgtctgtaatgtcatgctattaactcaatttggaagtaggcgtacactggagcctcactcagaattgaaacctacatatcgaaaactaagacttttagtttagaccagaaggcgcgggctctgtacgtctacattcaaggctgaaaacggccatttctcaaccatctatttcgactaatttggagatttgaaaatatgatatgtgatcaacatctatatgacggacagttcttgtgagtgaggctctctagtgcagttcggtctgagtagccttcatttagtagtacccattgagaaattgaatcggttaaacctgagggagacaaaaatggtgtcacattaccttttagtggtatgaccgagttgcttcctcaagaatatttgttgtttcacaaatttcgcttaattgtacatgatatacaagaacatacgtcctttgtcaccgctcgctaactatatgtgtcttttataagagtgcatattgatgaattttgattactgtatataaatgtcatttcctcttttggagctataacagatttctgtttcataaataagggacttgttgattgtttctttttccttatagcgctcctgtggagaagcagatctgaggaccctgtctatgccaagcagtcagtatctggaaatctcccctatttcattgtcttgttgtaaatcaatgcttgaatggccgtctagtcttacttacaaaatggtccctttattgactgtttcaattcgctaccacaaagttgagagatagtgaacgctcttgaatcttataacttcagcgaatggcttagaaccttgactaatgttcgctagttgatagcagcatgtatgctattttagtagcgcctcggttgggccgatgtaaaattttatgcgttctctgcttttctctacatttcggatagttacctatcatatggagcatttcagtccaaatcagaatcatacatccaaacatccaattatacatagactggaagcaataggaaagacacgagtgacgagaaaactcgaaaaggtagagtaatatgattcaataatttgccctccaaacgatcaccatagctcgatcattttttttgccataataaaattacgaggagcgagaatgcagccacatgcatagaacgtatttcgcgacagaaaaaatgtcaatcttgtgccaacgacatatttcttcatgtggataatagccaacgcaaataataaacaattaatgaactacttcttcttccaggactataccataatacaaacacttacatggacacgccttgccagttgcatccaggcgtgtttgtgaaggctgattagatgaaatggacactttagccatagggcaaccgttttgactgaagttaagtctgtggctagtcaagaatacgatcaaggttttgatcgttggcaacgccgagagggaccagtggcaaagagttgttgtagactgatgtcagttgctcctgccacatagttcaaattgataaggagttgaaattgtgaaactaattgatctacatcttcatcttcaactcaggacaagaaatgaatgcatttgaggaaatgacttgattccgaatgttacccgaggctagccttgtgaaatttcagaaacaggatcttcaatgcttggagataatcacaagaaattgtgtgaagattgccactttaatctggcttgtgcttttgtgaagaatctacaagcagagaaaatatattgtggaattgatctacggggactaacaaaagggtgcacttgtacatcaccaactttctactgtagctgcagttttagctgcagctgcaactaatgctgcctctagcctcccataattgtgtctgattgtttggtaaaaaatatcccaatattatcactgtaaactgtttgcacccgtttcagttcacttggttcaagaatcagtctagctgcaaatatatatatatcagtcaatttctagtgccaaattaactttccaagagcttgagtcagtcgccatctaatacagaaaccagtcaagatgcttcttagtaaatacactcttgcggcgttcagctttatatccgcagtgacggctgtcaccatcacacaagacactatcgatcgtggcgctatctcccttgggcttggtgataccatcattgaagatggggtatattggtctatcattgataacgtcattacagcttttgcaggtaatgttgatgtgggtacagggtctgggttgtacatcacaggcctcaatcccttgcttgccttacaggtgactcttttgctggggtcccttactaatgacggtatcatttccttcaatgctgttcaatctttgcttgctccaacatacaatcttgtgggaatctcatttaccaacaatggtgaaatgtatttaggtgccgatggttctgttggtatccccagcatcctgattaccaccccagtttggaacaataacggtttgttggttttttaccaaaatactagaaccacgggtcctgtcaatttgggtacaattggtcttactattaacaataacggacaaatttgcttttacaacgaattgtatacccagacaacaaacattgctggtactggatgtatgactttaaatgacgattcaagtatttttttctctaatacccttttgaatatcgatagcaaccaggtcttttacttggcagattctgcctcctcgatcagagcaactgccataagtgcccccaagacctacaatgttgctgggttcggtaatggcaacaagattggtttagatattccacttgttaacattccccctttactcaatgcttactcatacgataccaccactggtattttgacacttcgtggtgctggattgttatcaatgaatttcaacattggtttaggctataacccatctcttttctccattgtaaccgatgacaacgttggtttgctttcggttccgttcggtgcgcttacctattctggtcctcctccaaacgtagtgccgtcggtatgtcaaccatgtaagctacttccacccgcaccaggcactagtgctactgagttcactacaactgcaacttccaccaattctgctgggtttacttgtactgaggttgatgatatcatcatttccactgacaccagttactcctggtttaccagtacttccaccattactgcaggatgtgcttccaaccctactaccactgttacttctacttggactggtactgatactaccaccctcacagttactgatactatcggcggtactgacaccgtcatcgtcgaagttccatccaacgatcaaaccaccatcacttctacttggactggtaccgagacaactactgtgactttaacagatacccaaggtggtaccgacaccgtcatcgtcgaagttccatctaacgatcaaaccaccatcacttctacttggactggtaccgagacaactactgtgactttaacagatacccaaggtggtaccgacaccgtcatcgtcgaagttccatccaacgatcaaaccaccatcacttctacttggactggtaccgagacaactactgtgactttaacagatacccaaggcggtactgacaccgtcatcgtcgaagttccatccaacgatgaaaccaccatcacttctacttggaccggtactgagacaactactgtgactttaacagatacccaaggtggtactgacaccgtcatcgtcgaagttccctctacagccaacagtcaaaccaccatcacttctacttggaccggtactgagacaactactgtgactttaacagacactgttggtggtactgacaccgtcattgtcgaagttccctctacagccaacagtcaaaccaccatcacttctacttggaccggtaccgagacaactactgtgactttaacagacacccaaggcggtactgacaccgtcatcgtcgaagttccctctacagccaacagtcaaaccaccatcacttctacttggaccggtactgagacaactactgtgactttaacagacactgttggtggtactgacaccgtcatcgtcgaagttccctctacagccaacagtcaaaccaccatcacttctacttggactggtaccgagacaactactgtgactttaacagacactgttggtggtactgacaccgtcatcgtcgaagttccttctacagccaacagccaaaccaccatcacttctacttggactggtaccgagacaactactgtgactttaacagacacccaaggcggtactgacaccgtcatcgtcgaagttccctctacagccaacagtcaaaccaccatcacttctacttggaccggtactgagacaactactgtgactttaacagacactgttggtggtactgacaccgtcatcgtcgaagttccctctacagccaacagtcaaaccaccatcacttctacttggaccggtactgagacaactactgtgactttaacagacactgttggtggtactgacaccgtcattgtcgaagttccctctacagccaacagtcaaaccaccatcacttctacttggaccggtaccgagacaactactgtgactttaacagacacccaaggcggtactgacaccgtcatcgtcgaagttccctctacagccaacagtcaaaccaccatcacttctacttggaccggtactgagacaactactgtgactttaacagacactgttggtggtactgacaccgtcatcgtcgaagttccctctacagccaacagtcaaaccaccatcacttctacttggaccggtaccgagacaactactgtgactttaacagacactgttggtggtactgacaccgtcatcgtcgaagttccttctacagccaacagccaaaccaccatcacttctacttggactggtaccgagacaactactgtgactttaacagacactgttggtggtactgacaccgtcatcgttgaagttccaaccagctacccatcttctgaaagttcatcttctgaaagttcatcttctgaaagttcctcttcgagtgagacttcatcgactgaaagttcgtcttctgaaagttcctcttcgagtgagacttcatcgactgaaagttcgtcttctgaaagttcctcatcgagtgagacttcatcgactgaaagttcgtcttctgaaacttcatcttccgaagtcccatcatctgaaacatctgaaacatcttctgaaaaccaattcaccgaatacaccaccactttcaccaccaccaactctgatggatctgtttctactgacacaggtgatgttattgtatctactgactcggatggatcgtggtacactacaacttctatcatcagtgaatcatctactggtcctgaattcaccgaatacaccaccactttcaccaccaccaattctgatggatctgtttctactgacacaggtgatgttattgtatctactgactcggatggatcgtggtacactacaacttctatcatcagtgaatcatctactggtcctgaattcactgagtacaccaccactttcaccaccaccaactctgatggatctgtttctactgacacaggtgatgttattgtatctactgactcggatggatcgtggtacaccactacgtctatcatcagcgagtctagtagtggtcctgagttcactgagtacaccaccactttcaccaccaccaactctgatggatctgtttctactgacacaggagatgtgattgtttcaactgactcggatggatcgtggtacactacaacttctatcatcagtgaatcatctactggtcctgaattcactgagtacaccaccactttcaccaccaccaactctgatggatctgtttctactgacacaggtgatgttattgtatctactgactcggatggatcgtggtacaccactacgtctatcatcagcgagtctagtagtggtcctgagttcactgagtacaccaccactttcaccaccaccaactctgatggatctgtttctactgacacaggagatgtgattgtttcaactgactcggatggatcgtggtacactacaacttctatcatcagtgaatcatctactggtcctgaattcaccgagtacaccaccactttcaccaccaccaattctgatggatctgtttctactgacacaggtgatgttattgtatctactgactcggatggatcgtggtacactacaacttctatcatcagtgaatcatctactggtcctgaattcaccgagtacaccaccactttcaccaccaccaactctgatggatctgtttctactgacacaggagatgtgattgtttcaactgactcggatggatcgtggtacaccactacgtctatcatcagcgagtctagtagtggtcctgagttcactgagtacaccaccactttcaccaccaccaactctgatggatctgtttctactgacacaggtgatgttattgtatctactgactcggatggatcgtggtacaccactacttctatcatcagtgaatcatctactggtcctgaattcactgagtacaccaccactttcaccaccaccaactctgatggatctgtttctactgacacaggtgatgttattgtatctactgactcggatggatcgtggtacaccactacgtctatcatcagcgagtctagtagtggtcctgaattcactgagtacaccaccactttcaccaccaccaactctgatggatctgtttctactgacactggagatgttattgtatctactgactcggatggatcgtggtacactacaacctctatcatcagtggatcatctactggtcctgaattcaccgagtacaccaccactttcaccaccaccaattctgatggatctgtttctactggaactggagatgttattgtatctactgactcggatggatcgtggtacaccactacttctattatcagtggatcatctactggtcctgaattcaccgagtacaccaccactttcaccaccaccaattctgatggatctgtttctactggaactggagatgttattgtatctactgactcggatggatcgtggtacaccactacttctattatcagtggatcatctactggtcctgaattcactgagtacaccaccactttcaccaccaccaactctgatggatctgtttctactgacactggagatgtgattgtatctactgactcggatggatcgtggtacaccactacttcaatcatcagcgagtccagcacacttattatttgtcgtagagatgaatctgattgtgtgtcatctactggtcctgaattcactgagtacaccaccactttcaccaccaccaactctgatggatctgtttctactgacacaggtgatgttattgtatctactgactcggatggatcgtggtacaccactacttctatcatcagtgaatcgtctactggtcctgaattcaccgagtacaccaccactttcaccaccaccaattctgatggatctgtttctactggaactggagatgttattgtatctactgactcggatggatcgtggtacactacaacctctatcatcagtggatcatctactggtcctgaattcaccgagtacaccaccactttcaccaccaccaattctgatggatctgtttctactggaactggagatgttattgtatctactgactcggatggatcgtggtacaccactacttctattatcagtggatcatctactggtcctgaattcaccgagtacaccaccactttcaccaccaccaattctgatggatctgtttctactggaactggagatgttattgtatctactgactcggatggatcgtggtacaccactacttctattatcagtggatcatctactggtcctgaattcaccgagtacaccaccactttcaccaccaccaattctgatggatctgtttctactggaactggagatgttattgtatctactgactcggatggatcgtggtacaccactacttctatcattggtgagtcgacagctggtcctggatttagttcatactggaattccaccgaaccttcgacagattctggcgtggccactggaacagaaattaatacttacacctctgtggtgactgttattcaaaccacctgccatatcggctcagcttgtacagacatcacacaatcagccggcgaagcgcctgcatcaactagtactgccaatgccactcctctgtctagctctgattctgggtctggctccggttctgattctggatctgggtctggatctgattctgggtctggatctgattctggatctggctccggttctgaatctggttctggatctgggtctggtgctgattctggatctggtgctgattctggatctggctccggttctgaatctggttctggatctgggtctggtgctgattctggatctggctccggttctgaatctggatccgggtctgggtctggtgctgattctggttctggttctggttctggcgctgattctggctctggctccggatctgattctggctctgattctggttctggatctggctctggctctggcgctgattctggctctggctctggctctggatctggatctgattcaggatcggaaatttcgtctacacccgaacaaattgataatggtgattcctccagctctaatacgggaggttcaacttccacttcatcagttatcgctccttatgaaggttctgctggtagaattttggcaagaaattctcaaatctctgtcgtggttgtcagtttcattgcaattttgatgttctagacaatcaaaataatttttctttcacttcgattttcatgcttctttgctacatgttctcgtaaagttgactaccaaagtcaattttgcataattcccctttctttttttctttcacgttaaaatttgattccccagttttcttatagaagtttcaataacatttgttattgtactaggatcatccatatatatatatatatgaactagtttaatatattgataacaatactaaaacagtcggctcttcgcttgcagtagtaggtgtcaatattgcgtaatgttaattgaagggcaattaattgaaaacattaattaagattagagttacatattgaatgtatcaccaaactcaagaacgtgcatccaaaaggatctatttattgacttacttagatctacagtactaagatgacaataagctgctatatttcgataccgaatatctttaaaagtacaatcccagattaatattcgttaaatcataacgagatcgaactacaatcgctactgataatcattctgctatgaagtttcgatactgcagaagactccattgaaataaaaagttcatatataaagtatcatatattgcatcatcgttgtcgtataacaaaacactctacctgaaagcgcaacactctgccacaatgcacataactctaccagaaggctcaatacatccatctgaaattaggatttcctggaccttcaccaagctctgaagttgaaatatctttgtaactcaaattaacattctgaagcttatttcttcgtttattatcgaagaccatgaaggtcagaatcgacaacaccattacaatcgccaaacctccaaatcctgcagttatacccaaagcgggtatatactttggagcatccttgggtctgaatatattggtggaaattagtccagctgcgttcgctaaaggaactcccactgccgtaacgaccaccctgcgattttcatttggtgtgttgttattataccaggtggatgtaagaacagacgaagcagaagcaccagcggtcatcaagaagcaactaaaatatgcaactccgatatgattttgggtatcaatagcaccaaatactacaaatccaatcaatgtagttgcgattgctataccgacgaatacagatcttactttcacataatcggatccaaaagcaaagattaatagaaacactgctccagagacattaggagccacggtataaagattggtttgaactgaagattttcccaagctttgaataatctgaggaaaccaattgtttatactattgagtggaactccaatcgcaatctcttgaatcatccaagcaatgtatataggatgtttgaaaaccttgatagcatcattcaatgatgttttttgtccacctgatgcagatgaatcagtttgaactctaaacctagcatattctttctcctcttcggtgaaaaagctagcagattccaccgaatgcggaagaaggaagtaggcaacacaggcgaaagtaactgtacagcatccctcaatgagcaacaagatttgccagccatggaggcgaggatcattaatctgaaaaacaccataggaaagtaagccagaaaatgcatttgcgatatttgcagctgaatagaaaattgaaagtcttcgagccaactcgccccttctatagaaagtggtgaggtaataaattataccaggaaaaaaggcagactctgccatccctaaaaaccatctggcagccattaatccagaaaaattgaacacagaaacaatgagcaaagtaatggagccgaaggtgaacataagtaaaggaatcactcgtgctgcgttatacttcttaataaccaatgagatcgggaacgcaaacaaaacaaatggtatataaaaaatcgacaacattaagttccaacgatcaccactaattccaatgtcaatatcaagaccatcagttttagcgttacttatatttcctttatctagagcattgaaaaggtacattgcagcagtaagtggcaagattctaaaatctaactttcggcaaattcttctttcaagcttatggtcaacagagccaggagagaggacaatgatatcgccatttggagagatgatttggttaagtccgaatgcattgctgtccaggctagagcgagaagagttattcacaatatcgaccgcagttgttttttcggcccctttcatttttagctcgaagtattttacaatcaatcgaaaccaaccacttttaaacaaataattgcattctgaacttagagaacacaatgactatttatattggatagttggtataagggtcatttcttcgtatgatatgtagtcttgcaacccttatctcgaaattttccacaaccaagctagagatgggaaataattccgacagatgggggcgcgacaattgtaatgggggctcaatacagtgggggtggcaacccccatttccaatccgtaccatcgatttatataaggctctgcttttctatgcacccgtattggtaagggacatttcgtccactcgaagattaaacacgtaatgcccgcagagaaattagaatggtcagcaattgatggggtcgaacacccagtcttgtcaccagcttggattagtaatggtctcgtcttcacatcaggcatagttggacagaactacacgacaggtgatattccagattccctcgaagaacaaaccgaacttgctattgctaatataaagaaagtgttggaggctgctggtacttcgttggacaaagtgttcaaggtgcttatgttcatttcgcacctggactattctactactatgaacaagatatatggaaagcactttcttcagaaaccatcaagaagctgtgtaatcgctgcatttatggacgcaaggatcaaggtcgaactagaagttattgcaacgaaggattgaaatattaatagtttatttgtatagtaaatattatatgttattttcaaaattgaaatgtcaaccttgagtatcagtataacggaacattacataatcggattccaaaatttttcaatattcttttcttgttatacaccttccttctaaatggcccatgtcacctactgaaccggccaagagaaaacgaaagcgtatcattggaacattcaaatgtcctgctgtaaactgcggcaaggtgttctcacgagccgatcacctaggcagacatcaaaggagccataatcctggatctcgatatgcatgtccatatcctaattgtggacaaactttcaccagacatgatgtcaaagagaagcacttcaaaaggcacactaacggaatagaaaaatcaaaacgcgacgaaggcagcgtgaatatttctcatactgagagtacgaatttcaatgactatggcccttcccagattttgctggcaaaacttggagacggagtagtctcacaatctcccgtcaatgtactgaaatcaggcaacgaagccattttggagcagacaaatgagttgacggaaagaaatacgttgtctcctaccgacctaattgaatggttgtttcatgacgaactaagtgtagacaattcgaattctggaaccaatctcccggggcactcgaccgatctccccagtggattttctcctgtgtctttgattgaaactatgttcgcagttctgccgaactttccaaattctaactatagaattgcagtcaatgagaatatcagatccaatttgatatccttcattccctccttagaagccaaccctgactttggttgccttcaaattgaggagtgcttgctgaattattggctcttataccacccacaatatcctatcttgcaccgaccatccttcttaaattctgaagcgccgcctttgctattgttggcgatggtaatgcttggcagcaactttgtaccttgtgccaaaagtgccgactctctattgagaaaccccaaagctttggcagatcaaattgcggagccgttgagatggctcatttttgccaatattgactgcagaccaccggccaaagtttgggtcgttcaaagtttgctccttcttgagacatacgaaataacaagttccagtcgatttcttcatgagagagcatatttgcatcacggttccaagatacaattattaagaagatcgccaattttaggtggagatccattgaaaagtgaaaaccatgatggtgcatacctgcctcctaatcaagtttggaaaacttggatcgaagtagaatcgatgaaaagggcaactcttatggcattttatttggacactattcatgcaactgtgtatgggcacctgataattctatatgcgcaccaactcaaactttctttgccttgtgaagatgttttgtgggaatttgataatacaaacaagtcagaaaccttgtcatttgaaaggactccaaaattccttgctgcaatgaataaactacttcatagacagaaagttgtcacgagctcatttggaaagaaggtcctcttagcaggactattaacgataatgttccaaatgcagcagaaagacttacagctttcattcctcgaatgggattctatgaaagactcgtggaatcaaacaatatctttggcaattgacgtatggagagcagatatttgcacagagggaggttgctgcgatacagagaactctctttggtttccaattgaactgaagaagaagttacctccaatgttacgaattgacgacactcgctgcaaatttggattatatcatattgcacaaatttatatgaggatatcacattatgattacattatatatgctggtgctcctagtaggatgaatgttaaagctggaaaagcggaatacgagatagttgcaaagcgagtaatggaatggtcacatagccttaatggaagtataagtgccatacatgcctattggttcttgtgtgaaatgattctttctccggacaatgaagatatcaccttcacttatgacccaaacacagatcccttcatgcatagaaagaacataattgcaagtgctgttttggttctctttgcttataattattctcttcatggcccggaaagtgtgacatatgaccaactagctactagtgattactatcctgacaaagaagatggatattcttacttgaggcgaattcggaagtgtttatcaagaggaccaggtggaccctttcataggatcaattatggaagaactagtgctcaattccatgaagcgatcaagcttcattctgaaacattgcgatccattgataacaagcatcaccttgttggtttgctcaaactcttttacagaagttataaaggttgcaactgggaaattggtcgcgaatactcaaaactatttcgcaactgtattaagagatgtttaggtcgtaagagtgtagtttgtgacgatatgtacgttaattaagttagatattaatagaatacttttcttagcgcatcagttgtatctttaattagatctctacctttctgcaatacagcgtccatggccatgactggatgagggacaccagtataaattttaatttcagacttgactccgttcttgcgcaatttttcatgatattcgacagcctcagatctcaaaacgtcacattctgctgccgcaataaaacatggtggcaccttcttgaagctttcatcggagtagaacaatggagaagattctggtttcacgatgtctttttcatttggtaagtatagatatctgtaccagatcatcttctctgctggtaattgaggactcaactgaaactgcttccatgactccttgttttcaggagtagcagtattatcagtaacaggaaccaccaaaacttgaaacaaaataggaggtaacagctctgcaaatttcgaactggcatacttgtgagtaactactgctgttagattgcctccagcagatgagccaccaatagcaatcttcctattgttgattcccaaatcagtaggggatgattggaaaccgtacaacaccgattcaaaagcgtcatgaacggccgctggaaaagggtcttctggtgctaatctatagtcgacagacatcactacacacttcgacaatgatgcaactttagtacagaaagaattttcagtgtcaatgtttcccaacacccatcctcctccatggaaccaaataaataagggccagccctcagctggccgatcaccttccggaacgaacactctggctggaaccggcatggaaccttctgtgtgttttctagcgatcaggatatcaaaggttttagccatcttcagcaaaggactctgacccggcataatgttgccaccttttctgatcacagccaatggaaccctatgagtatagagaaagtttgaagcttccttcatatttttgtcgaagaaggaaacatattcttcatcaaatttatcctttatatcttcattcaattcatatggagtttctggtactcctccagtgaaagagtaatcggcttgaagttcgtaatatttggaccttgtcattcggctagcagaagtgcaatttagatattggtgatatgagtgaactcatgaacaagaaggaatacacaaattggtggaattctgtatttataatggaaatattcaagcttgaactactcattgggggtgagtttgtgttcgtaagtgaacggaattgaatctgttgaataatgaaaaatgcctaatgcggcacctttttcttatcaaatcttgcatctcactggtgggggccaatcgttatcaacagctttccccaccatctgcagatggggggcatttttgaaaaatgtcttgttccattcgtatataataattataaatgcagtactattagatcaaacttttcatgattcctcatacagtgtagcaaattgaaaatgtcttaccctgctcaattcatagcaaaaccaagcaaggaagctttactcgatgctttcaaggggaagctgatatccagcttgcctaccccttcttttcttatcaatgaagatatattcaccaaaaattgcaatagaatgcttcagaatacttcgcacttgagtgccgatttccgagctcacgtcaaaacccacaagacagtagaaggcactcgtttgcaattgggagaaaagtcaccgatcaaaaccgacaaaattgtggtctccacgttagtggaagcttggagtctaatgccacttgtggaagagggcttgattagcgatattttgtttagtttgcctgttgtgaagtccaggctccctgaattggccgaattggcaaacaaagttccccacttacggttgatgctcgatggatcagatcagttggaattgttggcagacttctccagagaattttccataaaagcaaaatggtctatcttcgttaagatcaatatgggaacaaacagagctggcttagtcaacgaatccacctctttagagaatactttacaaaaactcttaaaggatgataaaattagcgagtttgtggacttatatgggttctactgtcatgctggtcattcgtatagtgcggattctcctctgtcagctaaagatttcttaattcaagagattatccacgctaatcaggctgcaaaaggagcactccaaatacagccaggcttgaaactccaaatttctgtcggtgcaacgcctacagctcattcttcggaacacttgaatacagatgaattgatagcagctatcggagatgaactttcaggaaaattggaattacatgctggttgctatccatgttgtgacttgcaacaagtttctactggttgtgttacgcttgaagaggtgtccatttctttattggccgaggttatctcaatttacccgaacagaggttccaaggctccaggggaacaacttgtcaatgctggagttttggccttatgtcgagaatttggacctttaccaggccatggtagagtggttgatcctccaggacttgaaaattggattgttggtagattgagtcaagaacatgggatcttagttccacttgatgaaaaccaagttaatgactttattcctttgggaaccaaagtaagaattgtcccacaacattcttgcatcacagcagcagctcatccttggtactatatagtagactccagtaatagtgtagttgacatttggataccagctagaggatggtagactatattgatgtataagcactaatatctatattcaactaaatttaccagtaagttttgaggcaattcatatttagcattctgagattacatattttgtttacaatacaattggtacatcatacaatcgagaagaaatggtatttatattaaacatctagagggacttttctatcttatcaagagtattcaagtcagcttggtactttgagtaagcgttcaagtcgacttccttgctgagcggtggccttcctgttaagctttctccaaagccatagaactgtttgagtgcatgtttgacaccaacgacattcaattccataatcatcatgtcagccttagtaaccaaatattgaagttcgcttgattcctttaactttccctctttgaatagagttaaaagctttaccataaccttggggaataaggctgacattccatcaatagctccgtaaattcccactgataatgctggaatcaatacttgaccaagtcctgtaaaaggtctgaaattattagtttgacaaagttctgaatccctacctaacatggtatacaaatccaaattgaaatgagtcaacttgactgcaactattttctcgtggactgagagcttcttgaaactgtcgagagtaattgtgacattgtttgaagtcccaggataattgtaaatcacaattggtaaggaggacttatcagcaactttaagaaaataatcaacgattccttcttggctaatcaatttgggaccaaaataaccaggaacaagaaggatcatgaaatcggctcccgcatctcttgcagaatcgatttcttcaattgcttcttcaatattaccaattggaggtgcgcctgcaataattttaaaattttcatctggaatagccattcttaaactagaaacgagggccagtctttcttgtctactgaggtgtggagtttcccccattgaaccagcaacaacgagaccagatattcctcgatcatacaagaactttgcatgttcaacttgggattcaaggtccaaagtgtaatcagcatcatttttgaagaaggtagtaattggagtgtaaattccctcagggagtacggaagcaggaagaatagtcattttttgataaacaataagcagcgaagagcattatcaaaattggcaagctatcaaagtatatataaataggtgtttcatgcttttttgcaatcaaaaagtgtgcgaccccccatccaatgcgacccccaatgtcccccgttgaactgattatgcctccccccaaagcaactactccacattctagtcgaaccccaccagaacttatttattacactctactttagtcactcttctatctaaaagtgtactctctccttttaagttcttaaaaattgctaccttgtgccattgtatttcatattggggggaagcgattgcgaaaagaaaaagtagcgcatttccaggttcggtttgatgaagactgtttttggtgtgagcgggtctactgtccttcaatgaatattggttaagtttgctgtcctgcaagtcatagatgtctctgcttgcgcgaaatgattgttgaaaggagatggaaacgtatcaatacaaggtaggtagtagatacaaaatgcaactctcttcgctaatatttaagcccttttgcgtctttcctctcgttatacatgtcatgttctatgatctttattctatactcgattctaaacacattgcaagcttacatctctgagagcccttaagcaagtccattgtaagtcaacgacaaatctaaagataaacactgaaatccacgttccagactttcaagacaccatccaaaccgattgtaacaaacagacccttatttccgtcgtagctcaaccattccacacctgaaataccaatttggtgtgccaatggaaacttcaagaccttagaaggcttctttacggagtataaaaacaagccggtgtccaacccaccactaatgatgaattgggaatctggagtccacttggcatcatttaccttactagaatggaatgcccaacgtgtagtgacaacagaggcactttttgtatcatataatgtatactttcctgtcaagtctgcaacagccacgaattttccatcaggagaaatacgaataaggcttggaggagaacggagtggggggaatttcaagtttgatttgataatactctctccgtctatagaaagcacttcaacagaattggtctttacatttgtaactagtaacaagtcttccttcgcggcaaaccctgtagcttcaaaccccaagtcgtactcaattttcttttccaattcctctgtataaatctccacagatgactcgagcaacactacgatcaatttcggaagtacacctatttgcttgggttgtcccttcaaagagacagatttggataatttgtcccccctccaaaggttcaacttatcgtcccagcctgcactgacaacataggagtcttctgtcaatatgcctactacatagtttgaatgttccccaagtctatcagggatggtcttgattctctcagattcgatagtccattttaaaatgggaccctcagaagctccagtatacaaggtttgaccgttcaacgaaactgaagtcaaaggcgacttttggccaggaatgacagcaaatggtttagattcaccttccttaaagtagttgagatttccgttaagcgatagtgagatgatgtaagccttggtaactacgactccaacttgctgattgtctatagagctagatgaagtgaatctatactcagctgtagattctaatgagtctatgttccattgcttaatggagttgtcagccgaagcagtgacaaatttcagcgagtctttaaaccacgagatagagtagataccaccttcgtgggcattttccaacttcttaatgtactcgccagacttcccatcatataccacaattgctctatcggaacctacacttacgagccactttccatcaggcgagaacttgacggccttgatagaattggtatggtgaccacggatactcttgtcgaatttgaaaggtggaccgttatagaatactaacgccttatcttcaccaactgttgcagctctgtatggtctctgaggcttgatgtcgacagcattgacagtggccgaatggccctggatctcaccgattgaattgccggaatcccatgagaaacagtgaccaaatttatccttaccctgcccaactgcaataacacgcgaactgtcagaatcccaggctattgacttgatggggcccgaaagaatctggaattcactcttgatggttggttgttcgaagctgattgtgttgctatcttcgccgataacagacgagtcccagatcttcaacgctccagactcatcagcagatgccacgtagttaccagaaggagcaaatgcgacagctgttgtagtgtggatatgtttagagaattgcttgggcttcaaagatgattctggatccacacttctgatgaacacagacttacccgttgggtaggcaatacgatcgttgacctcatcgtaggaaatatgaactgattgagctctagttgtggacggattgggtgggtagagtgctagtggcgcgattgacatggcgaagattgagtggagaatagagcaaaaccatatgttagagagatatttatataaaatagtaggctgtaactattggagttgtatcacgtgacttgaaaagttcggcgatacgaagttgaaacgcgagctataataatttggataaaaagctagttgaaaaataggtaaaatgatacatttaagatacttaaatagtcctataggttagtaaaaatttacatatatactatgagaccaattccaagtatattataccattttcttatgtaccgattgcccaagcttcacacaaatgtgtatgcaattttctctttcaaatctatcaatcgcgaaatcgcttaattaggactattttttccagtccctttcacagttatttcttcactttttgtgcgcttcacgtgacctaaaaaaagaacggatacaattggactctttgaaatctagtctgttgaaacgatcacttttcccaagttttctctcacttgccagcatgttgagaattggttcgagttcagtgactcgtattgccgtgagagcaccttatagagccatggcggtgcgtccgctttcggcctccgcaagagtgtggagttcttctgtatcagagactggaaaatcctcgcaaggccaagaccagaaacacgagaactatcaaaaccaccagcaatcgtcccttgcgggcattgttatcaagctggctctttttgccactgtcgtatatggagctaccatgtttatagccaccaagaatgacaaggtcatggactttgtaattgaccagcagattccatactatgaagaaaccatcgacttgattgaaaacggttcctacgacgacttggttctggccattaaggccaagatatcttccattagattgccatccaaggatgaaatcaccgagttgtcgcacaaaatcgaacacacttcagaagatttgttgaaagaaactaagcgaaagttggaatcagctagggctgagtttggttctcattctactgctggctccggtacttcggcttcattaccagccaatcagttgcaaaagcatccagaaattgagcacgtcaagaaggaggtcgagcatttgccagctatcaaattaaatgaaaatgttgttctgtatgttgatgcatcagtgaaggctactatcgattcgttcaacgacttgatcaactcaattgatgtcagcaaagtcacacctactgatgaaggacttatcaagacaattaacgagaaggtctctgagttggcctcgaaagttggcgctctctccaagaagttcgacgacgaattgcagagcaagcttaaggtatcgcaaacggaattattatcgtcctataccaagaaggagttggagcttactgaaaacttgttgcaccaatttaaccgcgagagggcccagttggaatccaagttgaacgagagattaaagcaggaaatcgccgccaccaaggaaaccatttcgcaggcagctgtcaacgccgtttcgatggtgagaatcgaacaaactaagaactttgaaaagctcgttgccgacaagattaacgaagaaagaaacggaaaattggctaatttggaaaaactcaactccagattggaaagcttggaacagtttgctgaaagcttggaatcacaggtcgtagctacccaacaaaagtcggttatccagaaatcgttgtcttcattgaaggccgtgttgttcgtatctaatccagaagaaaagcctcagctgattaagccatacgtggatgacttgtttgaatcatctcctgacgatgaagttatccaattagcattgggtgaattgggtccattgttgtccaaggaatcgactcagtccatcttgaccacctcacagttgttgaccagatgggagcaattagtcccagaattgagatcagcctcgttgttgcctcctaatgctggtttattgggacacttagcctcgatcgtgttttccaagttcttggtttctgttaagggtgacaaaccagatggaaaggacattgaatcggtcattgggagagttgaagccagtttggtcagagatgaattggacgtggcagttgaggaagtagccaacttaaagggttggaccagaaagttggccaacgactgggtcattgaaggaagaaagagattggaagccgaatacctcgtggagctcatcgacgcggaaaccagaatcttgtaaacatatattattcataataaaccacaagttccattggactgaatgtagccagagaaaagagtgtagaaatacattagagaaatcagacaaggaataataaaaccggtcacgtgacttttatgtagaaaaagctcgttttcattcaaactgtatcagacacaatatagtcaacagtatagtttccctaccgctaacttataagtacaaactgttgctatgtcctcaacagctaacagcgcttcagtgtatggtggggatgagatcaacgccatagtgctagatccaggctcgtaccatacgcggattgggtacgctggagatgatttccctaaggttataacttcctcctactacgcttctgcgtcgaatgagccaatggaagccgagaaggaagactccaaaattggtagcaagtcaaccaagaggatttttggagatgccatcgatgttcctcggtcgaattacaacgttcatcccatactcaaagattcagtaattgttgactgggatgctgctttggaccaataccaccatttcttcaagaatgtaatgaacgtcacgtatgaagagcagccagtgttgatcacagagcccgtatgggcagagccaaagtatcgtcagactttggtggagaatttctttgaatactacgatttcccagcattatatttggccaaggctccatcttgtgtctctttccaacagggtagaccgaactgtttggtggtggatattggccatgactctgtgagtgtgacccctgtcattgatggtatatgcatgatgaagaataccatgcgaacgcattatgctggtcagtttttggtggatcaagtccaagaccatctagccaagtacaaagatttatctgtagagggtacttacaaaatcaagtcaaagacacctacagtataccctgaaaatgcagagttcaccacaagaacgcttcctgaagatatcacggcgtcgtatgatgagtaccagaaactgaaaatctggcacgagttcagagaaactatgctagaggtcccagagcgcaaactagccaataacaacatgcagcagctggccaccatgaaggagttctacactctggatgccaataccagattgtttgaattccctactggacagtcgttactgttgaactatgataggtttgtgtttgcggattcgatctttgatccttctatctataaatttgccaaccaagagttgaccagcaagtatccccccaacaacggagttctttcgattaagagtaagtatgacgactacagaccactaaagagagtgcgcaaggcagagtctaaccagtccacgcctccgccgggtgacagtcctaccaagcccagcaagaacggcaagcacgaagtccgaggcttgtcgcagttgatcactcatacgttgtcaaccattgacattgatctacgcacctcagtcgcacacaacattattgtgactggtggggtttcgttggtgcctcaattgacggaaagattgtacaacgagttgaccaacaccaatccagggctcaaaatcaggttacacgctgtgggaaattcaacagaaaggttgaaccaggcatggatcggaggcagcgttctagcatcgttgggaacgttccaccagatgtgggtcagcaaacatgagtacgaagaggcaggggctgaaagaatcttgaaccagagatttagatgaactgtatgtatagtagatgtaaaatcaatttaaaagtacctttagaagttaacataattgcgagattttgcgcaaaggaagtagaaaaatagaaaaaactaacgaaacctaaaatgaatattccgaaaagaagacggcaaagcatatctagaagagaagctttgcaactttgaatgagatgaaagaacaaatgttggcatctggcggtcggcacctgggcgaggccagaattacagtattaggcgagatgtcaagaaaagaaagtcatatttagtgaaaagttgtgaaaaatagttaagtagtcgaaaaaagagatcttcaatcgaagagtagaaaaagaaacaacattcgccttaaagtataataaagagggaccggcatcatataatagcttctaaagaattatgagcaccatactaaagctcaattatgcttcttagtcctactgcattcaacttgggatgattaaatgtttcatcccctcagccattgttgagcgataggacgatttcgtgcagaatgtgggagtaccaaattgcgtgcatatcggtatgacaattaccactgtaatgctgatggaagatctacctcgattggcacggggctggcaatctagggagcagcttgtataccttttgtaggcgaacaccgataacacctcagtacaatctacagaaatttcattcaatttggtgagtccattctacatattttaaacagtagaatataccgatctactctgtgtctacttgcacttaaagaatacaacataagatcctataatcatcagagagctctcttcatttttcacttcatctactacattgggattatatttatatacttcattctctctatttgctatctacctaggtaactttcagagtatgaatgccatctcattctttctcactactgatgcgcagcacaacttgatacagcttgttgaacttcacgcaccacgccatgccctggtttacgcacccgccttgcgctgagggggttcccaagataaccacatatcccagcaattttaaattatgtggatataccctagtgtattttttcatttgtggtatcatttggtgtcaattggtgtgtagcaagctatataattgcctgtatctactcaattggatttcatcaggcttttataagaacgtagtggaagttttcaattagtttcgttcgatttctttgatcttatctacatttttcagccctcgacctcccactaagttctccgcaaaatgtctacagacaacaaactgctcatcaaaggtgccctcgacgtcgatccatggttggaaccttactcgcagccacttatcgaccgtcagcttaagttccaaaaatggtacgctgacttgaagctgctggaaacttctcttttccaattcgcttcgtcgtaccagacctatggtgtccacggtaactgggacaccaaggaagtggtggtgactcaatacgttcccgatatccaggaggtctctttggtaggagaattcaataattgggatgtttctgctcacaaattgaagaaagtcaacaattttggcttgtggtcacttaccattcctccagtcgatggagattttgcaatcaaacatgattccaagtacaagatctcgatgaaattgccctcaggcgaacagatttaccgtttggatccgtggttgagaagagctacccctgccacagaaaccactttgtacgaaggccgtttctggaacccttcgccagctgaaacctacaagttcaagaacaagagagcaaccttcaactccactgagggtatcagaatctacgaagcccacatcggtatctcgactccagaacccaccgttggttcctacaagaactttacggaaaacattttgcccatcatccacaagctgggctacaacaccatccagttgatggcagtcatggaacacgcctactacgcttcctttggctaccaggtcaccaacttctttgctatttcgtctcgttttggaactccagaggaattgaaagagttgatcgatacagcacacggccttggaatcaaggtgttgttggatgttgttcattcgcattcgtctaagaacgtcgaagatggtttgaacatgttcaatggaacagaccactacttgttccacggcggacccaagggtaaccatgatttgtgggactccaggttgttcaattacgaaaaccacgagacattgagattcctcttgtccaatttaaagttctttatcgacgtctatcagtttgacgggttcagattcgacggagtcacctccatgatgtacaaacaccacggattaagtttcggattctcgggtgactacaatgagtacttcaaccctgaatgggttgatacagatgccgtggtttacttgatgcttgcccatcagttattgctggagatcagcgagaaagaagacggcttcaagttcttctccattgccgaagatgtctcgggtatgcctactctttgtttgactattcctgaaggtggtattggatttgactacagattgtccatggccattcccgacatgtggatcaagattttgaaacacttgtcggacgaacaatgggatctccattctatcgtccataccttgacaaacagaagatataaagaaaagtgtattgcttactgcgagtctcacgatcaagctttggtcggcgacaagaccattgcattctggctcatggacaaggaaatgtacacgcacatgtcagttctttctccactcactccaatcatcgacagaggtctttccttacacaaattgattcgtttgcttacttttggtttaggaggtgaagggtacttaaactttgaaggtaatgaattcggccatcctgagtggttagatttccccagggttggaaacaacgagtcgtaccactatgccagaagacagttcaaccttattaaggacgacttgttgcgttacaagttcttgtatgcatttgacgctggaatgctctcgttagacagcaagtatggtgtcttggacaaaccccaggcttatgtctcattgaagcacgaaggtgacaaggtccttgtttttgaaagaaatggccttctctttgtgttcaacttccaccacagccagtccttcccagactacaagattggtgttgaaactgctggtacctaccagattgttttgaactctgacgaagcgcaatatggtggtcacgacagaatccaagaagtcgatgccaacggcaagcctgttcagtatttcaccaacaatgatccatggaacaacagatcgaattcgatgatggtatacattccaagcagaactgctattgtcttgcaacttaaagacaagatcaaagcttaatttttcaataaaaaaatagtcctcaagaaaatccgccagattttcaaaggatacaattaaatcacatatagctatagcagcccatttacatatacattttatggaggatagacattatggcttgttagtaaactcgtaggaccttttgcgcaagtactacgcgattccatattttcatatgtagaacttgtgtgggacaacaagatttcgcaaccatttatagtaccatagacagaactgggaggatttgccgtttcaaaaccacacaagattccaaacgatatagagccgaatgggaaaaaagattccaattataagcctaacacagagatgacaaaaacagcaagcttgctctcctacgtttcttcaagtcttgacataagggtattctttagtattgcagtgcgcattacttctataaactttgtttttatgatcacgtgaatatgtacagagatttatgcacttcaggcacgtctggttcttgattgtaattcaaacgtcttctgtagcctattatacaatttaaaaccaattgactccccaaccatgctgtccaaagagatgacgttcttcgtcattgataccacactggagatggtcaataggtcaaatcccgtttcaaaaagatcaagccttgagagaggattaggctactttcatgatcatactgcgactctattgcttaagaacaggaagattgaccgcgtaggcataatttgtgcctcagatgctggtaaccatgtctacagtgctgatgaggctttcacatatacggatcttcgtcacttttccaccattatagaagagtcgtgtaaagtcacatcagggccaccaggcaagccaagtcttgtagaagccgtgacgttgggactcaaccaattcaaacccaagattcatttaaagtacttgcgtaacttggtgatcatttcaaatgccgcaggatcacaagatctagatgaagtggacttgagcgagtatacgagtttgattaaggcttacaacatcaacgtaatatttgtaggcatagacttcctggccaactttgagaagactccagaaaaagaaaaaaacgaacaattctggagaaagattgtagagaaggaatggggtggcgtagttttggatgcggacgaagcaaatgagtctttggtgtactcgctgacgctcaagaaagttgctcccagagtaagctattcaggctcaataacatttggactaagtagcgattccttaaccaatgtaagcatattgcaagatgatcctttatcgcttaaattagacgttcagacattcccagctaccaagattgagaaaatagtcggtcacacatatacgatatccgagaaccatgccgccaataccgttaagagaacagcaaattactattacaagaagtatgataacaatgaaggaagagatgaaatggctggagaacaggacgatgatgacaacaatggcaactatgtcaaagtggatgttcatccaggcgaatttgtaccaggcttcaaatattcgaatcgggatatcattgctgtaaattccgaccttgctgaaatagcacagcttcgctcgaatcctggactctccattatcggcttcattcagaaaaccaacctaccttatgcatatttcacggatgaatcaagttatgtaataccaacaaagggaggcaaagtgtcaaatccaattttgttcaactcttttgccaaagctttgcttgaattgaaagctgttgcattagctcgtttcgtgttggctgatggtaaggaaataaatctttgtgtcttgattcctcaacttgtctcggtaaatggcaggttatcgtactcgtttatactggttagactagcattgaaagaagaccagaagatcggtagatttccctacttgaccaagaaggctgaatctcaaattgataaagatgaaattgaagcagaagacgaagacgatgatgatgaagatgaagatgacaagaaacgagaagagcaaggcgatatacgtcaacgtaaatttccatccgatgaaactaattccttgatggattcttttattttatcgcgagatttggatggtggttccaacaagcctactattaatgtcctacataatcagaaattagacttagtcgatagtcaatgtgtttacatgggcgacaggctagatgatatgagcgtagacgaaaagcttattccacgctccactgctttggcgaagtataacagaaacttgaagaagatcatcatcacatcgctcgagcatgatagtctttccttattcctcagtgaagagaagtttgtggaaaagtacttggttgagaagaatcccaatgctgagaagatatcgaatctataccactacgacaatattcttcgaggcaacactgtaggcaccaagggctggctcaaaggcttcaatgtacattcgagcgatatttccaagacattgatcgatgcccttgatgtgaaatatcttgagaaggacgagaagaaacacaagcgtcgtaagtacgaaggaactgcattcgaacgattcttccgtaatgaaggcgactctgcgaactccgatatgaaggctgactttgatgaatttttcgacgttaaagacttattgggtgggtagtatagatagtaaataaagggtcaatattggtactcaatacctgaaagctgttagttctatgtacatgattccttactaatatttaaacaaacgatttttcaaatcgtattccctatcctttgctgttctccttctatgttttgatctagcggtaccgtcttcccccaaactatttacaattttttcggataccttcatggttgtaacccgttccctttcgttcttgaagatctgtttgaggtcgtttccattgatgtccaagatggcttgcaagtcaaagacagccttatatttctgggagttaccctgcttccagagacttatccaatgagaagcgatacccaactcgtcgtaggaaccgtcaccattgacttggtctctgtacttagctatatggtacaacaactcgtcgattgagtttgtaggtctgtttatgtactcagcgtatttcgaacctgttggatcttgtaaattaagcaagtacaacaagtaatctgcctggattacagggtctataaacgaagtgtgaacacatcccaccattcctagagctaacatagtttcaatatccttcaccgtgggcaaaaatacacctggagtatcatgaactaagatatctggctctcgacagagccgtatgatctcactagtatttttcgtaactcctggctggcctcctgttctggcaacttttcttcttttagtcgagatggctcctactgaatcgttgctcaaacctacttctctgagagtattcacaagtgtcgactttccgacattgggcatcccaataatcatcaaacggagtcccaatggaggaggaggagtcatttcaaagtaccgttgtttgattaagtctattactttctgggcgtctttacgacttctacaatcgatagttagatgcttctcgtttactgattcatgccattttcggagtacactgctcttaagagcagataagtcctttttgctgtagaggacaatcttctccttctgggctagcactctgtcaaagagtacattggtggtggaaaggggagctctgctatctctgacttcaagaacaagatcaatttgtggagcaagatggccaaacttggttagtgccttctggtgatgacctttgaagttggacaaggggatattgtagttcggaaagatccgacggggtataaaagacataatgaaatagtatgcgagactaatgtacaaatagtatatgcttcgaaataaaatgtaaatgtattttaatagcaatcagatctgcttggtgcgctcgcatttaaaaaagtgaaaaattcgagatgcctactatttattatcaaaaatcttttcttccattttcaagataaaactttctaagaaaagaatgcctttgataactttcacaggtttgccgtcttctggtaaaactacttgggcaaaggagttgcagcgacaacttcagaagaaaatcgaaactgcaaaggaatcaaatacacctggccataattacaatatcatatatcattcagatgagacactaggaatttctcacgatgtgtatagagattcgaatctcgagaagcacgccagagggaaccagatgtctgctgtgaaaagagatctttctcggtcgaatttcgtcatattggactctcttgcatatatcaaaggattcagataccagctcttttgtgaagccaaaggagtagtaaccccacattgtgtgatacaagtgattaacccaattgaaaaatgtatagaatggaacgagtcagaaagcaaggaaaacaaatgggatcaagatctcgtccatcaactcctaatgagatatgaagaaccaaatggagattcaaggtgggactctccgttattcaccattttgtcagcagatgaaaatgaaaagcttcccatagatgaaatttgggattcattggttttgaaaagacctccacctcccaacgctgctactctagtcaaacctacctcgggaaacaactttttgcaagagttggatagacaaacacaagaagtcatcagtaagattctccagcatcaacaaatcacaactgtcggaggtgaagttcttgtaaacaaagaccaacagttggtggttgagttgccacccactcctgtgagtattgcccaaatgcaacgtatcagaagaacatacatcagtctcaatagaatgagatctgtggacatcgatagaataacgccactatttgtcgaatatgtaaatagaagtctcaatagcgattaactttaatgactacgaattatagacaaaagcttcaaatgctctattgtgtattatgctataaatgatgctaacgttttctctggtttttccacttaaatgaaacctttcctgctgcatccaccattttcttcttactacctttcttcatcaattctcttgtagtttccattctggcttcaacttctttcaactgcttttccttctctaatcttctctctaatgccttaaattgcttcaacttcttcaaatcctgcctgtcctttaatctctgttctagtatggaatcttcactaacaagccgtttgtcactctggagttggcctattcttagcctgttttctctcttctctaaaagactggcatctgtatcaaaaaaatctgcggcattgaatgattgctggctttcgagagaatctacaaacactgtatgtttaccactggcactgaaaccgagctcttccttctctcgctctattttttgaacctcagaaagtctggcagtcctcacatagttcacgtcttgcgtcttgagcaatttaacttgatctacactcaacacttcactatctctgtctgttattaaaattcctctgtcatcgacttttcttcttgtcatagcatggtagtattcgtctggattgtataccgcagccttcttcttcaatgccttcaaagcagcctgttttttgtgataatcagcagctcttaatcgataatctttcttcttttccaatagaccaaatctggctctatccagcgtctgggatctctccttgtgctgctttttctgcacattgtgaaccaacttcgccattctgtgaagtagacgttattctattttttggtggatgtttttgtcgaatctatcagcttcaatatatgtaattcgagatgctcttctcaaaaaaaagtgatgatggagaagtcgcagactgaatcagaatatttcacaatgtcgtgcgacataaaaatgactacggttaattcagtaaaattgtagtctatacccttggcatgctagtacaaaattgccccgaaatatagacgaatttctcaagatatagcccaaaatatataggaactggaatgtttattttcatttgaatggttaatcatctcttcccaatcaaattgttctcaggcagattctcctgatactagatcggaactattttatcacgtgacacaaaagtactgaacacaatttttttcaattcaagagtcttagaacaagcaacatttgacttctctatccacaaacatgataagaaggatcgtcggaccgtttgcgagacttgcagttccaagagtctgtgttagaacgggggtggttttacctttgaggttcaacagccaggtgtcgaaatctcaatcagttagtgaactgagagaagttttgtctactgttgtagatgaagacattccatggttcatgagagatgaaagcacttctcctcttatagatactaaggagatagaaattccctccattcctgagaatgctcctgaaacagtagaggagtttttaaagctcgtagctgaagaatacggcttgcaagatattcaattattcgatttgactctgttgccagagtctcatccatcaagtaccaaaaaccaagcagcaagctatataattatatgcacgggaaagtccgagaaacacatatacaaagcttcgagtgagcttaggctcaatattaaacacagtcatgatatccttccatcgctcgagggagtggtttctggaggaactagccctgctgcacgcagaaggcttctcaaacgagtgagaagaggtgctccagctaccgacaatgactacggaaaagtgccgaacagttgggttatgtgtgatactaaggtcgataacattttcatccatatccttacccagcagagaagagatgaactcaatttggaatcattgtggtgtagagatgaagaaaaggaaaagtacctcccaagcagtacttctgtagaagagtctgatgacattttcataggcgtgagaagaggtttccataccatgactccattctgggcacaacagaggaggtcatattcaaccaaaaaattgcattctatccagcaactctttaatgaggactccagcatcagcgaagacaagttgcaatcgtataaaaacaattttgattcgaattttgtaccgagaactgtacaagcattcagagataaatttgagctttatagaaccatccatgtgcttaatccatcattagtatcgtttgaacaggtccgcgagactattctcgaaaaatatagttcattggatatctatgtgaacaaagatttctccattacttcagaaaaagtagaagatgtcatcagatacatgaaattaatcatagattcaccagaaatagcagtttctggtgaaaacacaggagtatttgtcgatagggtattcgacagcgtttcaaaattcatatctactttggtttccttttcatatgaacaagtcaacgttcttgagcatgatgaatttcttccacttttatggagattgacattaattgaaaaagacgatgctgttctcaattcagaggtaatcacaagagctattcagggagaagtatctttagggacagatgtgtttagaggcaattcgccaatttcacaagcatccaataaagcccgggatgtaattaatattgcgaagtacttctccgagctcaatcaagtcatacaagcagtctccttcaaagagttagtacttttttcctacggaaatgctggcaaatggagcaagttctggaacgagtgggaggtttcttttgggttctttggtaatggatccccacaggctgcggtacactcatgggtcagattagtggtctatcttgcattgcgagacaataagacgcagcaattgcatttcctccataactattggaataattcggggctaagtcgtagtattgttctggatctcgaaagaaatgaatgccgttttggatccccaacagagaaaagagttttcatatctgcaatcaataaaattgtcgacagtgttaacaacagcaataatgactccaaaaagcaacagacgggatttgccgaagtcaaggcattcatagaaagactctaggcgacgggtagttgcacatctgtaaatagcaaataatcataatcaggtaatataaggttagaatcgaaagaagtccatttgggtgtagttcaataataaaagataactataacaacacattttcgttattatataagtaaccattaattaacacattacaaattcttagttctttcatttcgactcaaaagtgttctaccctaattgtctttccgccttgttatggagcagttgcaaaaatttcgtgtatagacgcggtaaacacacgaccttgcaacacaagccaaatctggcaatgttatactttcaattagtcttgaatgctatttgagagcttgaaacaaatgtcttcggtagaaatggagcagctaaagaccgtgataaagaaatgggagtacagtttccgggaaaagaacgaccgtttaccttcgaaactggacattaaagctaatgctgatatccacaagctctacctgaaataccgagcattgaagagtgggggccacagttcccattccaagaggaatgtaagcagtggtttcaaagcagcacagccagtacataattctccacctccagagactagtgatgagcgtggagttgaaatcatgttggaatctgagattgcagagtatgaaaatgaggatatagaatctgaccttataccgacagtgagggagttgggcccaactccacaggccaatggcaaggtgctatctatattcgatatgaggatgacgccaccagaatcatcgccgttgaaatcacgacagacaagtgcgaatcctttcacagagttcaagactcctacgaaagttcgtgttaaacacgagttaaggaacacaccaacacgaacagatagaggcaaggagctgattttcaataaactcaagaacttaagcacagagaataaccatttggagactccaaaaaagaaggaaacccaattgggtatagacacccagctagtcacacccatgtatttgggtcgaaccaacaaaaagtttgagtttgccaatggaacaagtataatcgattctaacgaaaatatctcgtcgtctcctttcgttgtccaggagatgactccacgggtgacagtcgaagttacacctacacgtaatcctgtgattgattttctggtttcgccatctccgctcaagtcacatagattctttacaaagaagctcacggacgttttccacgaaatcaaggcgatggaaaatagtgatgaacttgaaatcgaagagaatgaagaagaagatatccacgaagatattgacaacgataatgatgggaaccagaaaccaagacgtaagaagttcaccatgaagagaactacaagaagatggaagatgaagcctactattcaagctaatgttgacggagatagcattgcgaaaaagaacatccatgatgaaatcaagaaattagacgacaagcaaaagaccgatttggaagcatatatggcgtctgatgatgaatctgaagaagaacctattattgttaaaaaagccaaaccccaatcgggggctaagaagatcaagcctatgagcaataattaccaaagactcaaaatcaacgatccacgttcaaaagcgtttaagaggagaatgtctagaagataggagtagctatattctatatttaactatttattatgcatacatctactacaagtagtactaattaggtaatgaaaccacaagatcgacaccttcaatttgcgagaattggactcttggtttcaaccttgaaatatccagggtattccctttaaattcaacggtactggtatatactggcttttcccatttcgtcttgtcactttcgaagtcccacacatagctactcatggctgattcgccctttttcttggagtctcttatttcgttttccaactgtgaaatgtcagggtcttcattatgttcctgtgactttgcagctctctgcttttctaccatggtgaccttaccatctttaatgaccatttccaacgacctttcacctctaccagttctggcactccgaatatcattttgtctccgcaattgtttctgttgctttttcaattgaagtgctctttccacgggagacaaccacatatttcctgaggtagcactcagaatttcatagtcggccgcattatctatgatcttagttctttctgcacttgtagcttggaaattgagcaaagtttcaagtctttcttgcgccatcaataagtctggatttattttgcttctttcgatttgaatgttctctatagctgcttctttttctctcacttttgattcttccaattgctgctgagctttctttttctcagcttctgcctgtctcaaggctctatcttgagccttccacaaattttcaccagcattcaaggtgactacgattttcttacttttggacttaggtagaacgtccttaacttcctctggtttcttatcactttcatggacgcccaaaatctctgtcttctcctgtcggagaacattcatgatatctactctatctttggcagataacaaatctgctccacaataggaacacggctgtaagccttcttttgtacatatgattttcccacaatttaagcagtttggcgcaatttcaaacaacggatgtctagttgccatacagttgcacacccgtcttgtatcgtccaggtcggacttaatttcaagttcattcaagacgctttcaatgtcttttagattgtccaagtttctcttttttgactttttgcttgtttctggagttgacgattctccaaaaagttgggatgttgtagtggaagtctttttatttagttttcctgtcaaattcgaaactttaggctttggcagagctgtttttgttgcttgacctgttgctctccaaacgttctcagaacttgaagatgaaatcttcagggatttgggaatctcaggtggtttctgtttgccgaccctttcattttgttctttctgttcttgttcttcttctcgtttcattcgtaaaaaatttcctataaaagctagagcatcggtgctgtctcctaccaaattcaagaaatggttctgggtctcagcttcagacgtcaacgttatagcatagtccaccatttcttcacaagttgccctatcaaggggcaacaagtctgcaatggcattcactgagtagcttttcaaacgtctgaaactcattgtggtggcgagaagcaagatactttaggaaatcatggaggtttttcattatgactcttctatgagaatggtctgcatagtcaagctctcatactaacggaattcgcatcactgatagttaagaatccacaccaaagacacctggaagcccatacaaggaaagtgatacacaacgatggttcacgcttttgagaagaatacataattttacttccgagcttttactatgttaccgaggtacataacaattaaatctcgaaaagatattcaactcattgcctctgtattcttctctatagcgaagctaaactctcataccgcaagaccaaacaaaagcagactacatgcactccactattatttattttacatcatcacaatcagactttcaattttgcttatggtttctttctacatagaaaggcaagtatagttccttatttgtagatatatgcccgaagatccaaaccagacgacagataccgtcagtgatgctctcaaagcgaaatatgctgaaatcgcgtctctcaaaaaggcaatagaagaaaaacaggtgcgaaactctcagtttgctccaacttcagcatatccttctgtctcactgggtgggatgtttcccccacgtaaaggaggtgctattagaagtacgcgatacgctgtaagaggaaatactcgaggacgtggttttggtcgtggcggatacgcttcatttcgtggaggagccagaggagggtttgttcatcgccatgttacggctgtatttgacacatcaggacaaaacgggtctggaagtgactcgtcaaccggcgacaatgatgatggagtttcacattctccacctgcagtgacgggatatgtgacaaagcagtccaggggtgggatgtcgttggtaagtaccgacatctatgcccgagaccaggagagatacgaggcaattcagcgagagaaggaggaactccaaaagaaaattgcaagacaaaagcgtagagaattaatgcaaaaacagatttcaaaactcaggacgaagacagatagttgtgaccgagtcaagatcgacggccagattttcgcagtttgcaaaagaggtagcaaactcattccattggcaacggcacccgatgatgctccatccacgactgagtggcacaacaggacatttacaagatcatcaaacggtactttgagaacaaaatccagaataaggaagacttccgagcaatgtcgatatttttcacgaacaggtacgtatattttttcaatatttgcattttagaagatacgaatatttgatattagatgttgatttttcatttatttaacattctgaattttgaattttaaatttactgaatatctaattttgttaattatgtgatttattttttcatggacagttatactaatcactgaatttctttcgaatctttcaaaatttcgtataggccagtgtatgaaaggttcaaaatgtaagtatatccacaaccggtccagaataagggtgtgccagcagaacttggtgggaaaatgtacgaaccacaactgcttgttctgtcatgatatcaacgagttcaacacacctgtctgtcggtactatatagaaggtaagtgcaccaacctggcgtgcaagttcatgcaccataagcccccacactatggagagcttggctacgaagtgtgggtgtgccgcccatttgcggttggtggctggtgtagtcgtggccaacaatgtccgtttattcatctattcaattgtccagattttgaagaagatggcaattgtccaagaggaaaatcgtgctatttggcgcatccaacaacaataaggacccaagagttaatcgagactccaatgaccacctacgtacgcgaagatggagatgatatagtcgtagatgaaaaggagaaaaaaatcttgatcaatagctacactgttgatccagatgttcttctccattcacgcgagggaaagaagtatgatttctacatcgatcagaaagcggccgatgaaaagaacggtgacatggcatctgtctccgaaaaccaagagtttatgattgtattttcggacttggatgaaagttccgacttctcgtcagacgaagaagatagcagcaggaatacggaatcgttgtcaaggaacaacgactatgttctgttgtgatgactctggtaaacaagaaagagaagagaaaaacgtcgaaaaaataaacaaaaatagcattggaatattagtagacgctaacatataagcccacaaccttctttttgaattgtagtagctgtgcattagactattgattaatactaaattggctcttggaggtatttcgcagcccttattatctttaatctgtgaggttgttatatgcacgtatttcctctctgagaaaatgctgcaaaaagtgcctccctactgatcgattactcaagcggcaattcccactttctatcaaactattaatttgttccctttttctttgtaaattcagagttatcttcttttatcacttctataatagtgttagttttctctgggggagccttacgatcttgtaaagttggtttttatcacaatttcgcaacaatttcgaaactacactcatacttcatacactataaggaagattcttatgatcttaaatttcaactaagaatcatacaacaacccaattctgtaaaggtcacaaactttgtcagcagaacctcttatattcaaaacagctatatttatttaggaagcattactggagtttcatactggttttacaacctttataatgtctaccaacttgaatattccttcagacatcaacaatccacccaaatggattcccgtccagagtctccaagacagataccaaaccatcagtaatctcggtaatggaagttttggtagcgttgaattagccaagtttcgtttagataagcatgagcttttcagggctaccaatgaaaagaagggaactctcatgtatccactccaggattcacaggtcaacatatccaacttagtagctatcaaaactatgaacagacagcttccattgctcaatgattacacccggatcaaagaagttaggttcataatggctatttcgtctcatccttgtttagttcaaatctatgagattttcattgacgacattaatttccagttgcacatttcaatggaatctatgaatcaaaacttgtatcaactcatgaaagccagaagaaacatcaatttctctcctgtaactttgcgcagtattttgagtcaggtgctttgtgctattcgtcatattcacagacacaactacttccacagggatgtcaaaccggagaacatattggtgattccttctcaccaatactatggtacaaaacaggcaattccaccatacagaaagaatgacaactttgtcatcaaacttgctgattatggactcgctagacacgtaggcaacacaaaaccctatactggatatgtttctacaagatggtataggtctcctgagattcttttaagacaaaagatgtattcaaagcctattgatatctgggcgtttggagctgtagcatgcgaagttgcaaatttctccccgttatttcctgggtctaatgaacttgatcagatctggcgcacactcaaagtgcttggttgtcccataccattagacccgcactctatggataggacaacctccttgccaatgggagggttctggaaagatgcccatgagcttgctagtaagcttggattcacatttcctccagagacaggagttcagatacaggatattctccccaatgctatccatgccgaattagcagaagtagtacgtggatgtctaatatgggatccacaccagagatctactgtagaaaggctctgttgtatgccctatttcagaaccactgttgcagccattgatttatcaatacaaggtgtcaatgctaccgatcctacgcaacaagaaaatgtagaactaccactcaagtcagtcaaagctacaacttccactgcctctgctaataacaagcagtttaagttagttcacaatggtagagcatcaaagccaatatcgcctataaataatgtaacgcagccaagtaaagtatacagctatgtcgatcttgacgacggttacgagaaagagtttatgaagcaaatggaccaagcagagcccataaccactgaagaagaagccaagtacaacttcgaccaagatagcggtttaatgttcggtaacgactacatagttcagcatggtaaggaaaacgaaggaaactttgaagtggggtacacacaggaaaatcaggtaattagtggttccaaggctcactatggaagtccgctaggggaggaacgtgaccaacccagtgttccacgcagtcttccaatgctcaaggaatcgcttgatgtgactaccgtacttgatttgataactgacacctcctttgacagtagtcacgagatagacgtcaactcatagctataattagcctagaataatcgtgtggtcatcgggtgaccaaaattcaagggcggtgactaagtagaacggtacttgtagaattgggtaataatattcgagatcctttcggaaatcacataccccacattatacacacttgaaaaaagaaatgatctagtattgcagtttataatctagaccgttggcttacactctatttattcacaattgtccttatgtcagattctgttgaaccatcgtttgttatttagctattctaaactgcaaccacaaccacaacccaaccacaacagcaaccagtgcaatgtgcattttgttatctaccaccgaacatccagactatccgttcatccttttgtccaacagagatgagtacttcacgagacctactcaagctgcccattttagatcgtttgatggtaccatgaagattttatctcctcttgatatggctagacctgaacatggcacttggataggagtaaccacatcgggaaaggttgctgttctagtcaattatcgtgagatagatcacgctcgtatgtattgattctatttatgatggcaaattttgcgatatgtggcactaacaatttgtagacctgctaagtgaggtatccagaggcatattaccattagattatctttgcacgaataaactggccgataaatggcatagaaccctcgaatcgtcgttgagccacgttaccaggggcaaagtagagttgagtcagatcggcgggttttcacttgtgtatggacaattgtccattgatcccaagacaggcaagcttaaccacttgaatatactaagcaacagaggagaccatggcaagattcatgcatctgcgaaagataattccaacgaagaaagagaagaaaaagaagaagcagatgaagaagaagaagatgatgatgaagaggacgacttgcacggtgatataagtaacaagaccacatttggcttatccaattcattgtactacgaaccttggaagaaggtcaagcttggtgaggagctcttacatgagttggtagagaagtctaaagaaatgaagctttcgcaggaagctctagtttctgaatgtttcaagttgcttagtcataatacttacgacaaggaagtagccaagcagaaggatttttccaaaaagattacagaacttagaaactcgatatacatccccccattagaaacctacattagccccagtgccagattgcttactgctggaaaatactacggtacaagaacccaaaccatcttgttgcttgacaggtttgggtaccttaactactatgagaaaaacatccataacagcgatgacgtcgacgacgacaacattgtcttcaaccactacaggtttaatatcgatcaacaatagcagctagttaaattgtagggctgctgacggatcgtggtgtatgttagcatcttgcaattcagcgtgctgtttactatgaaggcttaagtgtaagtctcaactatataaaagtattcactatagagcattaattaattagtcttaactatagaattttgactgtttagtctacgaatagactgaccataccaattatgaatcgaaaatacaaagtgtgaagggcatagtcttgatggcgtcccaaataatgaactgcaaagtagaaattttaactatgtagtctcaaaatggagcttaactatggagtctacagtgagtacgtaacaaacatggaacacaaaaaacatatcatggtacaaaaatataaattcaaatttgtacggaaatagagcatttacgaagaagacattgccttgaaccagaagtcataatggctgtgcaaacgtacgaaaagctgccatctacaactatataccataagcttcctctaaagatcaacaatgacagggcccgtgacactctgtcgattctcgtaatgatccccggaaatccaggtttgatcgagttctacaccacgtatctcgatttgatccagactgagtttccagcactcgaagtgctttgtattagtcatgctggttttcaaacttcagaacctgtaaacagcgagaaattcaaattctacgatttggagtatcaaatcaagcacaagtttgacattatctcggagtttattgcccagaaactagacgacggctacaacaatgtcgaactttactttctttcccattctgtaggctcgtatgtgcatcagcgagtcatccgcatgttgctacaggaaaaagaattgcacggcaagttctccattaagttcaccggactcatatgtcctaccattgtggatattgcacagtctgacaacggccaatttttcacaaagttgttttctttgttgccgatcatttccatatcactttgggttgcatggttgctcaacactattttgcctgaagctatggctaagtccataattgccaaaagatttgttgagaaacctaagtccaatgatactgactctgtagaaagttggcaaaattcagttactggggcatacaaactctacagttcacaacggctcatcgagcaggctttgaatttggcccggcaggagatgcttgtgattacgagagatgacatcatcaatgactggtttttccaacaactttcggagatcaaaatatggacattcttcgccgagaaagatcactgggtgcacaacagctccagagactacaccttacgaaagtaccatgatttaactaacaataacttgttgtttgaggtgggttcgtcggaggatgcgattactcatagcttctgtgttaaccaaagtgtagagttttccaaattgaccattaaggctatacggtctctagacttggacattgcctacgaaaactgagctacaatgcaaacaaggttaacatgattaataacacaaatagatactattgtttatatataagtcaaacatttactacataattaatttggaggaaaatcctaagcaccctatacattatagtatgctgtgaggggtgactcggagtcatcccattgactcgcgcgcttgactcagcaaatttttttcaggagtatgacttacatgactaccttactttaatttgcgataagttttattaacgtttgggtaatttgttgtggacatgccctttttcaaaggtagaattagctaaattatttccaacatttttcttgccaattttccttagccgcttatagatcctcttattgtctagttggaaaaaaagaattggaccataaatagccatcgatttcctccttgaaattattgatttacttctcttcattgtcacattttattaacaatgtctgctgctgaacaacttcgagacaatttagctgaagatatgctcggtaagagaatctctctggaagactctaagattactgggactgatggtgccaattacaacaccatgaaaggggaagacgaagaactgtctctcagtctgtatcctgaggacaatatgaatgtgaaagagttggacaagatttacaggaaattggactttagaattattccagccttgtggtgtctctatttcttgacatctttcgggtcaagtgcctatggtttgaccttgacaatgaacctggaagtcggccattctttgggacaacatttgcacctcacccccaagaacatttcgactgcttctgcattgtactatgttggttacattatttttgatgttcccatgaacttaataatgactaaggttagccctcagtcttggctttccagaattgtgattactgttggtttggtttatacttgctatcacgttttgcaatccagcggtgcacttattgcctgtcgctttatttctggtatggttggcgctggtacttggccagggatgagttactatatctctctttggtatccaaacgaaagactgactagaagaatcggatattattttaccgcagcccagatttcggctgcagtcgctggtttggttagtgctggttttcagaaaatggatggagtcagaggttacactggttggcaatggatgtacttggtttatggtgtgataaccattgctgtaggtatcctgttgttatggtggttgcctgacagaccattcaaggaacctactgacagccctaacaagttaatccagttataccataagttccttactccacctcacccattgaatgacaaagaaaaggaattacatagaaaggatcttgagcatagatacaaattgttgaagtggacttggaaagacgtcattgatgtcatcactgacttgagaatctggcccttgattatcatgtacttcggtgttgttggtaccggctttggtttggcagtatttggatctacaattattgctactaacaaccctaatctcacctctattcaagtatcattattgtatgctccaatctggttatttgacttggctggtatcttgattatcactcctttcgccgacaaattcaagaggttgcgtgccttaatcttctcccttgcttgtcttgttatcatgtgcggaatgtttgttaccacttttgcacgcggatcttggaacaagtacggtgggttgttgattgcaggtttcggtttgggaccaacagttcctatatgtatgtcttggacagctgaaatatttgggccaaggtatggtgatgttggaactgctgtaagtgctgctcttgtcagtggtttaggcaatcttggatctgtcacagctacctatgccttgtacagtggatggccagccgacaaaaagagattgttcagaaactccaatatgatgttggtagtgatgttaggagccagtattattgcctctgtagtgtgtcacttgctcagaaatagagttagacaacagaaatagagttctcgtcaagatatgcaatcgatacttgaactgagaatatactatttggtcccttcagtgagatagtaataattgtaaactctcaatgaaagttgcaccacacctatgtaatttaggacgaacattagatatagccaattgtcatacatatgaataatatagtaatatactttgaagcaaacacaagttggagtgaataatttgacaactagatctacattactagcagtggtgcgattgcgaaaaaaaaagatctgagccgaaatgccgcagactgcaacatccgaaaaggtcagaacccgttagccagattgggaaaggcacaccgcattcagcaccactttttgacaatggaaccaagagaaaacaacaaccgacaaaaagtcagagctagagaacaaaagcagaaccggagccaaagcgaattagcaattagaaaaccacacagctcataatgaaaacgaaggatccgcgaatgtcctttcgcatctccaagtccagacgaaagcctgagattcctggaacctcggtcatctccataaatgaacaagaaattcctggctcttctgtaatgtcattagactatccgagcaaagcacaactgaacaagggtaccaagtcattgcacgcgacatcgtacgtgtttgcagtagatcgaaatgccattatctccaagaagaagatcgttccaggcacctccataatcagaattattcagaaaagagataactacatcaactcagataccggcggtatcaaatatcctgagatgtcaggaaagcgaatattcgccaatgaagtggaagctgaaccatcgtcgaaatatcagaatgactcgtcgtcttctacagtattcaatattgaaaatatgactgactttcctataggagaaactacagactttgaaatttcgccgtccaccttgaaactgaacctagaattcggctctgagtttgcatttgccataggtcctgtggttggtgatctgaggtctagagaaagctctcccagacctgactgtgatcgcgtagaatctacaatagtattagaaacaggctcaagaaaacatacgaccacagaaaacaaaatacaatcagtgacaactccctatgtatgggatagtctggttactagcaaaaatgcaacggcaaacaaacatcattcggccataatacgaactaagcagcaatcgacgttttctgtaaatttgctgccccacacaaatctgtcaccaggacgggcactcaaattcaaattgcgggaagacaagcgggagaaagcagttccgggaacttctatcatatttgagaataacgaaattacaaacttatcgaatcaagggggaaagaagtcttccactggcttacggttggctgaccagggtaccaaggcctggcaggtctttaccaccggcaaaaactagttatgacatctatttacgaatcattagcataaatacaaaacttagggatttagcctaaaaagcaataaggaaaatcataagagtcaacatgggcgtaggtatcaggaataatatccgaatttgaaacggtctctggctacaaagcgtatttattaccgaatattcaacatgtgagaaagtggaggatttgctgggtaatgaaattccacatcaatccaaatcaatgccgtggcagtaacgggacttccatgtatccagctaattttacatttcataccgaagttgaaggaggatatacaattgtggcaccacactctaataaggtttgattaagcttctgcgacagcctataattgcgcggccaccgagctgatcttgtggttcaagtgaacagccagccacaagacaatcctaatgttaacaccaacaataaagacagtactttttccaatcacaacttagtaagttcttcaattggcatagcttggatcaacgtgtctgaaatgcaataaagataccatttgcagctagttataacaatttcaaggctatgcgaattttacttcgtatactgtggaattcgcaaccaattcaggaacggttgcaataattagtaagcaaaaagcccttgaattcacttcggctatcataaacgaaatacacagtttattgtgatcgtggagaaaaagtatataagaatcaaccttgcaatcgcaattaacaatctcaggaattttagtagcttttattcaaaaagagatagctaaaaaaatggcggaaattaaggttgcaatctcctctggatctaaggatgttggaaaattgaccaaggtcgcgacttacccaccacctgtgatcaatgacaaccagatcttattcaaggctgtggcttttgcctcaaaccctactgattggaagcatgttgtagctggatggggtacccctggttctatcgctggttctgatgctagtggtatagtcgtaaaagttggaaaggatgtcaagggcttcgctgtaggggattatgtctcctcggcccttcatggaaattacagaaaggatagaggcgcttttgccgaatacgtaattgccgatccaattttcaccatcaaatacgacaagaacactttctctgaacaggctcttccagtaggctccaacccagctggtagaatcacaaattttgaaggtgctgcggcgattaccttgggagtggcaaccattggattgtctttctctaatagtttgaaaattgctaaggataagctgaaaaatgaacttgattatattttaatctggggtggagccactgctactggtattatcggaattcaaattgctaaattagtgtatggattgaaagttatcacgactgcttcttccaagaatcacaaattcttgaagtcgttgggagcggacgaagtatttgactacaaggacagtgaagtcgttgaccaaattgttaaggctgccaatggtaacattaaatacgccttggatacggtttcgtccaagcagacattccagcaaaactatgatgctacaaaggggtctaccaaagtagcttttgatagtttactatttttgagtagcaatgatctcaatcgtgaccctcaaagaaaggaggatacttttgcgacgactagagtttatttggcttcaggggaaagttataacagagaaggacaatctatagtgccaagtaaagagttgcttgacaacttcaaacatttctgggaagaattgattcctccttatttaggccaaattattactcctggattgcgagttttggcccctgggttggaatctgcaagcgaagctttggaattgttgagacaagacaaagttagtggcgaaaaggtggttttcagaatttagaatggcgcaagattttctaatggccatgtatccgccaacataatgtaatctaacttccccctataatcagttaattatttttcttgaatattatggttgcaaatgataatagtgatggaaatgtgttcagtgagagaatcacctgttcggagattatgcagagtcagtaaacccttgtagtgtatgtcatgttaggtttttagtttaaaatgtggtaagtctaaaacttattgcttggatagaattgcatctgctgaatatactctgaagtcttgaacattgagagaacggtaaactacagcagaaacagtaacttaagtatttattcagtgagattgaagtttttagcggaggatatacagcagtattctaataggatgactccagtggatcgaaaaaggaattgaccgtttcatcgatattttgaaatcttcgtggagcgcaaaaattctaccgattaacctacaactaaatatacccggtgaccaaactacatccgtttacgttttcgattttaaataattgtatacgattatctgtacggcttcggggaggggctaggcattctgatcagttgcaaagagcccccatcattcaagtctgggatataatgaatagcgaaagaaatacagtcagacatgcaacgctatatcgctaagcgtatggtgtcgtctatccccagtccgctaacttcagggtgaagcacctgggccatcggtacaggagagctcacaaggctctccccattgtgcaactagatggtcgcttacagactaggaaaaatatcctctcaacgtaaaagctaatatagtggaaatatgaaggatcgttggacatttccggtcatattttccatggcacttttccgtccatctataaaatttattaatttatttttgcaattggcctttcttttgcattggtgtatgtataaacaaagacaaagagggtgaatacaacgggcataaccgtattttctagtgatatttgtatgtgtaaatgtgtgttcagatggctttggcaatttttgtggaactatagttgatcgacttcattcgattgtaaccggcaaactccacaacattcgatgaaattgctccagtggtgaacgcttcgttgccaaccccaacgtattttcgaaatattaaaaaaccctaatcgttttattcactgcattatcatcattagagttttgcaatacgttttgactacccgcaaaaattgtcaggagtttgggagtccctgccgaattttttgtgcttctcctctgggttatatgcggtattctgccaggtcaagaacatgaaacgggtaggtgccaattacctaacggctaaaatacccatttactaatactgtggtatgcaggcgtgccaaataaccatggaactttcgtttcacatataagtatatattccgaagtaattctcaatgtagtagctgtgaaaaacttcgttgcaattagtttttttacgtagacctttgttgatttaataattgttctggaaattgaatacaaactctgataaatttattttacactatgactgtcactaacattaaggctgccattgttcctggcaccactggcgaaggtgaattgaccgaagtagccaccatttctttgcctcaattatcagccgaccagatcttaatcaagtcagttgcctatgccgtaaaccctaccgactggaagcacattgcctatggcttgagtcctaagaacgctattgcaggctcggatgtcgctggtgttgtcgaaaaagtgggcgccaacgtcaagggcttcaaagaaggtgataaagtgtctggtttcatccatggtaacacttctgccaccgttggtgcttttggtgaatatgctctcctcaacccagatacagccatcaagtacgaagcctcgcaaatttcagacaaacctttgtctgttggcgaacacccagccgacttgttaaacacctttgaaggtattgctggtgtttctttaggtttggttactgtatcgttgtccttcgctcatagtttacaaattccagctgacaaggaaaaaaacaagaatgctagtattttaatctggggtggtgctactgctactggtgttcttgctattcagttggccaaattggtttacggtttgaacgttattgccactgcctcttccaaaaatcacgaatttttgaagtcgattggtgccgatgctacatttgactacaaggatgtcaaggttgttgaagcaattaagacctatgctaagggttccattttgtatgctcttgacactgttgccagcccaactacttttcaagctacctacgatgctactgaaggtgccgaatctgttgctattgacaacttgttggctttgaacggctctagcatcactacaaagccagaaagaaagactacttatggtcgtactttggcttacactgctcttggtgaaagtattgacttgggtggtggtgttgtgccttcaactccagagctcatgagtgactacctcaacttctggaagaatgttcttccaccatatatccctcttcttaagcattcaaatcttaaggtgttgccagctggtttggaatctgcctccagtgctctcgaattattgagacaagataaggttagtggtgaaaaggttgttttcagatttgactaagcttttggtaattttagccgaatttgctaggtcagcgctatggatagtttgacatgtgtttttcatagagctcgaacaataattctaagtaggatatccgagtatcgaccacactctagcataatacatgttataacaaacaaattataacaaataaataaagaatgacaaaagacaatttaaaaattccatcgcctggtggttaaacgactaacgtaggcggggccttaaatcagcgaaggtggagaagtgcctttgaaaggaacattttattctggactgacaatgaaatggtacgacgttaatcctcttgtatattttattcttttatccattttcgctttcaccttgatgatactgaaaaggttgataatgctcattgctaaaatttaattgggttgcgtaatggtcatatcaaccataatatgaataggtcgaaataattgatattactgacatgttaagaagcagtttctggacgaagaagggggataaaatagattgaagctcataagtaaattagaaatacatcagaaagatatggatgaagtaggtaaatataaacttattgaaaccgtccggtaggggatttgcatttgataaacaatttacggacgatagagacccaattcagatttgcggagagtagtagcgatctcagttgggtcgtgacctatcagatacctacttgaagcttttactacgagaaattaacttgaatggcagaagatacaatccatacgtagtatcgaatgtctgttggcgacggagtgaaatttccaagtcccggaaagaatgcaagatttgaagcaaagcaaaatacataattgcagacgacgggacctgcagagagagctaagagttgactattatcttagatttggttgcagccatttttgacacaaatagagatgcgcgggctgaagcgctttcccctggtgtcatgtgtgtctcatcagatgacagtgcagctgaccagaagcatatgaagatcaacaaaaggagaacagatgacaagtgtcagatgcttctccccaagaaaaactccactatcaggcatttgatcacacatttttgcgtgctttcttttgggcgattcttccgtgcggaggctcttatagccgtcaagaacagggaatgggactggaattggagaaggcgttaggaatttctcaaaaaggcattggaccatatgtatttggatagctgtacgcctggtttaattattagtgacttcagagagaatgttttaacggtggaaatttattaatacattttctataaataataatgctcgaccaagccagtaatagagtagacttgtgagaaatatatttattggtagtttgctgtaggagataactagtagcagttagttttataaatttagtaatttatagtacttactatattatgagcttgtagcacagaatttcaattctaaacagtgcaaataattgcaaatatagttttgattgcttgattattcgatttgttgctttgcgttaatagatttgttcgatttgagctaattgctcgtaaccgcaccggcggccgagccaaatacgaaatatgtaaatatgtaaatatgtgagagataataccgttcgctaattgtagccagagaagagacaatatgagcagcgtgattttccatttgccacaagaattttaggaaaatcatcgaatattgcaaactcgctcttgctcccaatactcctactgcggtttcatctccaccaccaccgtctttcccttccatcccctgtctgattatcttaaatgaccttgccttgtggccagggtcgtgcgtgtaccgttatccttccaggaacgaaaaaagatcatacaaattcgcatttttcaatcacactgttttatgtaggtgaaatatgccataatctgttgcgatagcagcagacaacagaaatatcaccatcaccaaaagattaggagacagttttttgtcactcatttttttcaccgtccgattcgttttgcttgctccagttttcctactagtttcctttccttcaattcaccccgggttgtttcagctgtacagccagttccaccgtccacctgttttgtaaccacccctccgtttgcgccggcacagaagaaaagatcactcttttattcggtccgatatttcaaacgttaggctgaaaaactaaacgaaaccaaataaaacaaccaaatctaaaggacatcaatatagaaaacccattcaagacagtcgcgtctctgttgccaccgcaaatcgaacacgtctgctagttgcgatctgaacatcccatcatcgcctctagtcctgtttttactccgccttttcatcaataaatctgttccaaactgtcctatcctacgaattttaggttagtgaaaattttacactgatattgtgaaaacacagcaaagccacacagtgtcaagacagtctgtatcattctattgtaaaagatagctcacacggtagaaaatcacaaatcaacatcaaatccatatctcacccaatctcgccattccaacgctgtctatgatttcccccgtcgatagcagctagcattcttcttaataccagtgttatttatattattgttgttgttcttcatattatcgttagatctttcttttgtttcagttcttccattgtaaatgctgacgccaacatggaatcattagacatttcctttcagtttgacaacaagtcagaccagtcactcatacggctatggcgtttgaccaacaaccacttcatagatacaaaatacctgtccacagagagaatcaactaccgatcttggcgattgctaagtaaaaagcttctttcttccaaacaccaccaaaactacagaaaaatttcacattactccagcatccacgatttaaccaaggactcgctttcagacttgagaccaaagcagtcgcagtttctctcagagagaccatctttattcgatcacagttccaacttaagcttgggaagcaacagaaagagcaccaacggtagtagcatagaatcgtacgatacccatggtcacaagtttaaagtcgtaccaacatccgaggacgacaacgactgcagttcggacgaaattgacgattcggatatttcagacatctcagaagaagacgaagatgacatagaagatgaggaagacgtacaacaagaggtaaagaagccaatagaggttgaaattccagcgacagaaatagatgcttccagttcacaaaatgcagaacagccattgcagagatcaggaacttcctttgttagaggattttctccgagccatgcttccgtttcttccaggtcttcagtagatcacaaccgaacttcgatcacatccaatcgccttccacctataaccagtgctaacacttctagaagacagtcttcagatgtctctaaaaacaagaacatcttctatattgcaaactcgccttctcctcctaataataacggcgaagaacacgaaacctcgcccagaacgaggtctaattattcagttagaaataactccaacggagacgttaaggcggctctgtctcaaaatctgcagcattcactgcaacgttcactgcaggattcacgccaaagatcaattcaagacctgcaacaaagattactgcagccaccactgcagcaggccagcatacaacgacagggatctttattcagcaatttccatttgcaattcaatagcgattctggcagtaagagtaatcttccagaaacagccgtaaaaagcgaaaaccccgtagttgaaattcctgcaccggcagaagagtatgattattcgtctactgatatttctgaggacgaagatgaggaagaggtagaagaagatgatgatgagggagagggtgaacgagctgaagatgacgaccgtaacagagccattgctgaagctcagaaactgtatttccatgacaaaagaggactcaagagcaaccataagggagaagagataatcatcaaatcaaaggataatgctgcgtctgtaggaacttatatggacaatgacagcgaatggttatctgtttcttctgaagatgatgtaaagtctgaattgaaggaacctgagtttcatcctttgcagttcactaaaataagaccaacgggatcgcaattattcaacgtctcctcgaactcaaccgaagtaatcactcccgatgaacctacgaacgaaaagcaaaagcgattttcttctcctggtattaataaaccaaggtcattattgtctggcttgttcttgaatgagttagctgcacttcactctaatggccaacacccagaccatccatttacaaatggaagaccagcagtaaagccttctcttaaaaggtcatcaaccactggtatcattactattaaccagaacaagtctcagaatgcaaaacagagaccttctatcatcttcacaaaaaggtatggatctctaactgatatctctaagaacgagtctgttcaagaccatgccgtgggtttgataccgaaaagtgtagaaggtgatgcttcattgcccgacgactatttgctcgggaagcaaaagtcgattgtaggaatatctgactttacggtaactaccactagtgcagtgtccgaatcacatgaagcagatgaccgtttccactcagcaagtggtgctatacctagggaaagagagactttatctacaagtctcaataagatttcacggtcagtgtcgaataattccataagaaaccttctttccaagagctcaatcaatttaggaaagctctactcaaagtctaggtttggccgttccgaatccagtttcaattcagaacgttcaggtcaacaaaatgctaatcataatagtcaaccaagagctccttcgcgtttggcgggcaatgctgtagatgattttgccagcaatggtaatgttgatctctcagtcaaaatagatggacccgtagaaccttcgacaaattctttgctcaactcgcaggcattagccagcaaggtccccactacaactgacttgatacccaaggttgccgatgaggcattgctagcttctgagttaagtagctcgctcaaagagtccattataatagacttcaagttgggcaagattcctcttcctacgagagtcattgacaatgatagtttattaaggaacaacgaagggttgattgctggaggtgacgaaagcgattttgatgactatcattcaaagggatggtagattataaatgtccaataaaagttccctccaaatttacaggtatacacgattggacgtgtattaagcatatacatataaatttatatagaataggtccggaatatgatgtatataattatttactaagcttctatagtaaggagcaaggatactatagttttgcattagagtataacataatcttttctaagagaatttggagtacattctattgatggtaaactattcattcctgtgcggaaattttcagatatcgcggaagacaattttaacgattagtgattctactgattaaattatccacacactgctggctgagtggatatgaagacttgttactacgagctcctcggagtggagtctacggcgacggatgtagagctcaaaaaagcatacaggaaaagagctcttcaactccacccggataagaatcccgatgatgtagaagcagcgaccaacagatttgctttagtcagagcagcttacgaagtccttagtgatcctcaggagagatcgtggtacgacgcccataaatcttcgattctacgtgacgatgacgagtatgtagaagaagaagcagatatgataattcccagtatttcgactgaagagctaatgagatacttcaatcctgccttgtattcgcgaatggatgattccttggaaggcttctacagtgtggtttcaagattatttgagagattggcagcagaagaagtaactcatggaaaagctctggattcaaagaccttttccaagtataaggatgatgataccgcgaacattaatgtaacagactcttcgtttcttttgtttccaagatttgggaatagcagagcagattatgcctcagaagtaagactgttctataatttgtggaacaactttgccagtgtgaagacattcaactggaaggatgaatatagatactctatggctccagacagacgtacgagaagaatgatggagcgtgagaacaagaaagcaagagatacagccagaaaggagtataacgaaacagtcaagaattttgttctgtttataaggaagagagacccaagagtgaaagcaggagttgccgaatttgagaagatgaagaagaaacaaaagcagcaagaattagaaaagcaagccaagcagcagcgagtccgcgaacttttggataatcataataaattcgaagctcaagaatggcaacagttgtcacttgaggagttgaatgatttggaacatatgctagaggaagagtatgatatcagctctgattcctcggacagtgaatacgatgagtttgataatcctttagaagacaacgagattcaggtatacgaatgttttgtgtgtaataaagatttcaaaaataagaatcagtttgaggttcacgaaagctcaaacaaacataaaaaacttctcaagaaattgaagtgggagatgaaaaaagaagggatagatttagggatagacaagcatgacctcgatttggatgactttgagactgccagcagcgagtttgattcggcgcaagaggaaatagagcatgagctagtactggaggatcaatatgtactacatgaaaacagcgattgtctggaagatcgttctaagaacgggaatactattgaagaatcaactgaatatgaagttgatgacgatgtcaatagcgatatagagcctgaactcacacgacagaaacagacaaaaaagaagaatgccaattcgtctagtggtgagatcgtgttagaagaagttgacgatgaacttgcaaagctagcgaagggtatgaagcttgatgatagcgacgaggatgattggtctacctccaagagcaaaaagaaagacaagaaaaaaaagaagactaagaatagtttacaaagctctagagagctgtctgctcttcctgaggctgagactcctccagtaaaaggaaccgaaaagtgtaccgtttgtaacgaaacattcacctcgagaaacaaactctttcaacatgttaatagtacagggcatgctgccttgaagatgaagggtaagaagggtaaatcccggaagtaatcctatgcatttatttataactttctgtaataataataacggtataaattctactttaagccttctttagacttcttcattttagccataactggttcactgatacccttattaccgtgagcacccaaaccttcacctttgacccatcctaacttttcaagcaattgtctaccgatattgtccttgctaatttcaggagcagaagctccaacaatatcaccttccttgaaggctggtctagtagacttgccccttcgtttgtcctttttgccgtcggtttcatcaatctcttcttgaagacgttttctgtcgctacgatggaaaatcggtctctgtttcgtcatatgattaatttgatcatattgaggaaggtagtggaaagtacttcttgatttcgataccttcatgtactgtttcaagccattgttaccgcatttcttagatttcatgttatagcatttagccattttggcaacagtcttgtttccgtgaggatctaggggcggaaacgataaagtgtctcttcctccatcatgcaagaaaagttcaaattcttttctaaagtccttgatatgtagtgaaaatggatacaacgttgtcaaatctctcgttatcaaagcctgttccatcttatcctgttgtttcttgttcttcttggacttttggttcaatctatgagcctggtactgttcgagcaacgactctctgatatcgtcttcaatatcatagccatctaggtcaagaccctttttgcgaccgctgccctttgtacggatcagctctgttgggttatctaacgataagaaattctgcagcgacttcgaataggcaatcaatgcttccaaatcaccatcatcctcatcatcttcattacttgattcgaattgttcttcttccgaactgtcagatatatacacatccgaatagtttgggtgttcttcaacttcatcctctatcaagcccccagttatgaacttgaggaaactattgagtctgtgttccttaacacctttcagcaaaacatagtctaccaattcatcctcatcaacccaactgaactgatccattgaacccgtcaaatcattattactggcatagtattggttttgaattccaaatctaacgttcataactttaatttgcgaaacgtcaaattcgtaatcttcttctaagaaaccatactcagggtcatcctcactttcgtttacatcttcatcttcagaatcatcagtatcctcttcagtatcctcttcttcggaatcattctcatttgcatttttgagttcttcgcaatcagactctgtctctggtttaccatcgtcaagaacaacattcagcaagtccaatggttgcattggaccatctacattgtaatcgtatatgtcttccccttcttcttcttcttcttcaccttcactaaaaacataatcgtgattgacattctcttggagaatttcacggaccatgtctttcccgagtagaggcaaatcaactacagcttgacctttgctgtctgtgtagggtctcaacgacaccttgcctatagtcaattcattgtcatgatcaatattagaagtttcatcttgtatcacctgatctataagaacacgaggcagtagtttacggacattgtgcttctttaatacgctgttgtcttgccgggcatctatagaaagtggcaaaggctctacgttcttggtctcagtttcagctatggttaagttcttgaccgatatctcctcttcgacatcaactacgtctaaatcctcgttattctcaaaatctgagatatttggatggccaatgtttgcatcctcatcaacttccagataaggtgtatctttttcttgttcagttacagaatctgaatctattgtcaaatcctcactatcattttcatccatactgttattattcacgaggatgctttcctcctttctgactttttcttccttgattttgcgcaaagactcgtttggatcataaacgtgggctgccttgacgaacttgattggattgttgcgaagagctcgggacatggtttcacttatgtgttgctgggtatagccgacttcatctctcaaacgacccgggcgacgcgacatcgacgacaacaggtccttgggaatgtagacattcccttccaagtccataagctccggtacatctatactggtaggtaaagctggacgatgattgttggatgtacctttgcttttcttcttgttagaaaatattcggcccgagggaacggaccctcctcgtcctcctcttcgcctggcccctttatttctatgtcccatgatgtagaagtatagtaatcaagcaggctagaaaaaaccactgaaatagaagaaagaagagagttcagcccaagcaatataatctatggcagagatattacctgtatatagctatagtccatattgatcctgatgactgcgaaaaaaacattaataaccaaaatttaatcagcgagtgtctcaggaacatttagaagagcccatggtgtgtaaaatacatatagaaaggtatattcaagccaaagtaattattctgaactcggcagggttgtctggatacaaaaattatagacattggcctaaaacaaccccctcttttctactcaaatactccttctgggccaagaactgctagctaattttgtcgcaatgtcgcgtttagcgctcacgctcactttcataattgatacgacatccacactctgtttacgtctattctattcttatcagatggtaattatacacatgtacatttgccactagacaaacacgtttatgctacataaatagtatggctcgtgaggacgcgtctgttccaagatcgcacgattcggctgatgccagccccaattccacagcaaaagagatacctgtgccgcaaccccctctattgaacttgaacttgaatttgaacatgaatagcggcttcaatctatccaactggtggcaccagatcacactgattgaagctgacagtagtgacgaccgcaacaacaataatagtaacaatggcatcaacgctgcagagtccgattcagcccagtctcaacctattgtagtcttgggccattcataccaaacgaccgaagaagctcacgaggatatcatcaagaagttgtgtctcacatatcgatatggcttcgagcggataccccgggctgttaatggtcccagtccgttgtcgtttatgcaatcggtgatcttcagtaagagtcttctctataatctccagaacttcaacaacttcatcgaaaaggaaaacttcactacagatgtaggatgggggtgtatgatacgcacttcacaaagtttgctcgccaataccttcgtgcgtttgctagacaaacaaagcgacattatcgctctcttcaacgatacctacttagcaccgttttcattgcacaacttcattcgtgtcgcctcgtcactgccattgaaggtcaagcctggcgaatggtttggtcccaatgctgcatctctctcgataaaacgtctctgcgatggctattatgataattcgacgtcagagacgatcttaccacgaatcaatgtgcttatcagcgaaagcactgatttgtacgatagtcagattgcccagttgcttgagccaagcaccgagaccaagggcttgttggtactcttgcccgtcagattgggtatcgacagcattaattcttattatttttcaagtttgctccatcttctttcgcttgagcaatctgtaggaatcgccggaggcaagccgtcctcgagtttctacttctttggctatcaggacaatagtctcatctacatggatccacattcagctcagatattcagcagtgacattgatatgagcacctactacgccacacgataccagagggttgacattggcaagttggatccgtctatgttgattggagtgttcattcgtgacttgacactgtacgaaaatttcaaaaagagctgccttgatgccgcgaacaaaattgtccacttccatgcgacggagcgtctgacggtacctgagtccagacgaaagaactccgagttcgtcaacatcaacagaagcgatttgaaggacgaagactatatcaatatcgacagagtcaaccgcttggacagcactgacgacttcattgacttaggcgatgactatgtagaaaccaacacgaacttggaagaagctactccgctggcggaagatacagttcctgtttctacattaagtgccagcgagctggagataacaacatcttcatacgaaacacctacttcaaaggatgacaacagttccagagcaagcttggacgtggtagtgctcgacacgacaggtgaacaacaggaataggaagaaaataatagattaatacttgtgggacaagctagaggattagaatatatgaatggaaattaccaatgtatacaaagagaatgtagaaatagtatttgcaattgacattgtagatatatagaatgaaatgctatagtatagaagatgatcaattaaactatatattgtgaaaaagaaggatctttttgcaatcattctataggtagtgcgagaacacaatatgaagtctcacttcatctgttacatttgttagcattagtcttcagatagttgacactgttctttccatcctaagcattaataatcatcgttgtatctatagactctgttggctgtgtatttgtcatacacgtagtcttcattgtatacttttttttcatattaccatcttatctttataatagtcatagaataccatttgaacttctcatttctaaactcatctaaatctgtaacatggtaacagatagtttgaagatatgcactgtctgtgcttccaacaacaatagatccatggaggctcataaacagctaaaggatgctgggtatgacgtgaagtcgtttggcactggttctgctgtgagattacccggtccctctatagataaacccaatgtgtacgagtttggaactccttacgaagacatatacaacgatttaatttcgcagaactgtcgtaagatgtatgaagccaatggtttgatacacatgttggatagaaaccgccacgtgaagcctgctcctgagaaatggcacagcaactcatatgctggcaagtttgacttggtgataacttgtgaagaaagatgtttcgacagcgtcatggatgatcttatgttccgtatgtacagcagaaatgacgaatccgatgtaaagcagattgtccatgttatcaatgtggacattaaggatgataacgaaaacgcattacttggaggaaaaggaatactaaagcttgtgaccatgatccacgagtttagacaaaaaaagaaggatgccgttgaggacgagtcggatgtgattctagaggatcaaatgatgtccatcttaacggaatggcagaaagaaaacacccatttacccactttgtacggaattagttactactaatcgtatatgagggtatagacataatgatcttaaagttagcataaatgaatagtttagtaaatatattatatttgaatacattaaataaataaaaagtaatgatgtgccactgttcttgctatttgactgcaattttcatttcttcattcccttcattactcttaccttgattgtacatctataatttttcagcgcgcagtgatttttcatgtctaaaaatttatctcttcttggtagaagagaatagcatccctcgaaatcgtacatttacagctggatgcctcccaaaccgagtatcaatgccaagaaggcaaagctctataacagtcggacgatccgtaccgagctctcggatcctagcttcacagataaggaaaagctcagcattcctgactttctcaaaacacgagaatttgagatcagatcgtttgagcagtcccagttaaataccaagtacgcctcgtcatcgcgtgtgttccagagtttaccgagaacactaaggagaaggacggcgtctcataatgtcaagagaatacccaaacgacttcgatcgcgagccattcgcgaaatgcaaaactctgtcaatggccagcctgaaaaacgcaagcaccaaagagggagacaattgtaccgtctccaggtcatgaaaaagctcttgaaacttggatccagattgaagttgatgagaggtgttcccaacgaacaagtgttgaaggaccagacaatacggaaccgaattaaggaattgaatacccagattaaatcgttagagaaagatcgttcaagtccggagatcaacaatgatttgggctcatatgataatacaggcgtagacgagtttgctccaagacccaaaggtaatttaaagtaccataaacgtcaaaagaattttgtctggcttccaactcatgtatggcatgctaaacgtttccacatgactaaacagtacggttaccagattcctttggcaccaacccaaaaatgctttaaagccatgaacagacataacaagcacgatgcagttatttttgatacctcttttcatgataaacttataatagaaattgcagacaatgccgacttcatccagttcttgctagaaataacaaagtacaagaagaaattgccaactgagattgtagacggaaccaaaagctatagcgattggattttcttagaaaacgagaaggttgctaaagtgttaatctacgcaaatattagtctcaaaaagatcttagtgtcggttttaccatctcttttcatggatatttatttcaagatcaaggccaagcttgccaactataagtcaaataccaccatcaacgattgcagatattccttaggaagtattgatatctgtggcccacaggctttaccggccatcagtaagattcttcatttgtacaagctcgaaaattcggatatccaaagaacgtggaggactttggcccataacacagattctggtttggtacctattggaactacattgagtttttctgtcaaggatcctagattttggaagagaccatcgagacttcccccgtcagcatctgatatctctttgaatgaattggtaatagcgttgaataatgaaactagctcaaatatagactcggattccattgcaaatcttctatcttctcgaagcagaaatgaatcctatgacgggcaaatgtcaattaaatccatcagcaaggaattcaataaattgtctccattagacaaatctgtgagctatgaattaattaacagatcaagaattccattattgatcacaaaattggcagaaggaagttggtcactcattcttccgtggtattgggtattacctatttggattctggctacgaaggttcgtcagatcaaggttggaggcttgaaacaaagacatcaattcaacttcgagaatgaaattccaaccttcccatacgattttccatttttgcgtgatggttggcttcacaataacgccgttggtaccttgacggaagcgaagtttgccaaacttaagcaaagccacgtcgacatttcaagaccagatttccaaaatctgtccataataagcccattcaaatgtgattggaccgctattcgtaatatcatattccttaagaaattaagtggaaaaactgatctagagcttgcccagcttgacccgggttttgctacccatgtgggtaacttctctaccagagagttgaagagcttacatgacattgaacaatccagcaaatctatcagcaaaatctataccgaagaaaaagctcctgaaattctgatagtgatatattgcaagaacaatgagttccacaaacaatttgtcgatggagcctatgagataaagtctcttgttgatgtaaaaatgaaacaattgccagtgattcaaatagctattcgattgcaaaataaaggttcgattagtgatggagccagaatattcttgtctgacagtttcaacaccaatccagaaggttttgtcacgagtggtgcttataatctcaacgagggtcaacctactgctattggcttgattcgtgctgatgtgaaaaagctctctaatccaactatatacatcagaaacatcggcaagacaactttctacccagctaaatttgtggaaattaagtagacgtttaaacattaaagtgcaaggaatttcagatagccatttggcactaattgtaactatactaatagtaatattgtatcgtataagcattctatattatactgtcttggagtaggctgcgaaaacctataaatccgggtaacggcttgcaacaccgttacccgcatttcaactcactataaaagtttgtcgagaaccttcagaaattttcaatttcttgtatgaacttttattcttcatacttaccaagagatgttgcgggagatcaagtagttccgcaatcatagactttcagaggcattgcacagcgccatgaaggagtatgccaactttccgtatgtttacaatgtgttttcggatgcattcgtagatagggaagtgtggatctttcaatttttgatttctccctacctttccttaatacattttgtattcttggatggtttcacagacacgtatgactttgttcaacttgtgtgtgagaaaatgtctttaatattttatttgtggctaagtcaggcgattttccacgaataaaatagagaatgacaataataatagctagattgaatacgatagctacaatagcgatgattaagaagtcgaaaagaagatgttgtagatttagactagcgaaatatactaaatttacttcaagatcaaatatatgtcaaatatattaatatgcgtttattacaagctgtgaagcttctatggagaatctatagcatagttttttttaattctcacaaccttagttgaagtgatcttgagtcgtcaggccgttattgttgatacccttatataaaccactgcctgctccattgctgtctgaaacgtagagatgggactccgccagagagccacgctctagcggctcgttggggttgatgaatctggagttttcccacatccgcatcatggcctgtttgaaaagatttacattgtagtcgatgatggccaaagaactgtcctggttatttgttctagatgactccaatacgtcgacattgtcgtcactgaagtcgctatttatcttgttcgtatttgtagtattgttggcagagtttcggacttcgtcgtttctgattagggctacaagagctagacctctgatcatctgcttcaagtacaatatggaaccgtttgaaagatgacttacagacttgagctccttttgttgacttgttgaattttgttttctggttccagactcgttttccacatacaaatcatcaaggtcgatggtaatgtcaatgaattcggcacaaacttcgtaagtctgaatgtctactggtgacgaatctgtggctacgtaaatcttggagttgacgtcaaacaaaaagaccttgtcgatagatgagtgctgtaccaagttgtcaagcatattttctaaggaaggcaactcgggaattaacttctggacgattctcgaaaatgcttcgtagatagaatggtcaaaaatagaagtcaagtagaaagacacttgcacgccttcaagccccaagtccaacaattcgtcgccggttctttgcatgatatctctctgggcatcgatacggtagtcttccgacaacccatcgattttgtggattaatacctcaatgttgatcttggggttgactttgtatgcaaattctatgatcatcgataaattggtcaaagcattcaagtattcgtcctgtgagtcaatcacataaaccaaagctccgatagacgaaaagagcctttctgagtcgtaattgggctcgaagtagttcaactgacccggtaattccatcaccgaaagatctatgagcgagctgaactgctctgttgtgggcttggatgtactttccaaatacaacgtatccaaaggctgcatgttgtggaatacaactttgcaaatagacgacttgccacctcgtcttaatcccatcaacaaaattgtggcattagtatccttggggttgggcaaaagtgtagcctccatgttatttgtgtgttgtaattggttttagaacgtaaagtaactgaaaatttaagtgataatttaaacggagagatggtaagcgaaagatttcaatataacgcttcgtagtgatacgagtcagattctccacactcactgaatgttatagagcaaggtagcaagactaaacagcaaataggaagataacaaaagaaggaaaaaactgacttcctccatctcgtgcatcttctttatccgttatcacttaacatttgcattattattgttagttaagttcgtgtgcggtccaaacggtgaaggcggttcggtcacgtgagacaatgcaccaagttgcaaccaaaacgattgggtgcaaatccatggagttatgcactattgcagagtagcagaggagtagttaagctcagaaaccactgccaaacggtccattggtattcatttactagatagattccaatttactttttagtctgatcgaattcatatatttatagtacatttatgaccatcatttagtgtttacgttcgatatacatattcacgctagcttacttatacatccggtattataataacttgattatatttaaatatcaaaactatcacgctttatacagatctatggtctcaaacgctttgggtctcttgggaacaacgaagcacgacggatattctttaagtccaagtagaacataaccactctttctaagccaataccaccaccagcgtgaggaggacaaccataagtgaaggcttcaaggtactcatggacaccggcaacgttagggtcgacttcgtgggcagtgagtctttctgtcaacaaagctgggtcgtggatacgttgagcaccagacaaaatctcttcacctctcatgaagaaatcgtaagagttagagtatcttgggtcttctggatcaggcatagtgtagaaaggtctgacggccaatgggaacttgtccaagatgtagaagtcggtatcgtacttgtccctaaccaacttacccaacaacttttcattctcagtggacaagtcttcgaagtcgtcgacctctttaccagcttctctcaacatggcaataccttctttgaagtggagtctcaccattttaccactttctggcactttgaattcttccactgggaattgctttctgactgtggcaatttccttggcgtatctcttcttcaactcagtgaagataaaaacgaacaagtcagccaaaatgtcaagaacttcgtggtagtgttcttcgaaagccatttccaaatccaaacccatgaactcggtcatgtgacggtgggtgttagagttttcagctctgaaaacgggagcaacctcgtacactttttcaaagtcagcagcaatcaactgttgcttgtacaactgaggcgattgtgccaagaaagcagaacctttaaagtagttgatctgaaatacgttggatccaccttcagaggcagcagcaatgatctttggagtatggatttccgtgaagcccctgccggccaaaaactctctgaacaaagcacagacaccggattggatcttaaagattgcttggttggttggagttctcaaatcaatgaccctagcatccaatctggtatccaagttgacaattggcaattttagagcttcagcctctgcttcagatctggaagcatcttcgatcaacaatggcaattgttcaggagtctcagaaatggtgtagattttgctcacgtgaatctcgacatcttgcaccgtagacgacttgatcaactcatcgaccttcttgacggtaccatggacaacaacaatagactccaaattgatggaggaagcccatttgaccatctgcttggaaattgcattagaatcggtttccttattggttttaaaaagagtctggatcaactccgattgctgtctcaatgtcaagaaaagcattgtagcaccctgttgtctcgaattgtgtactctggctctgaaaatgacctgttcgccgtcgttagcagcagacaaatccttgaattgtactctggtttggttctcagtaaaggacgagttgatcaatggcaactttccatagttctccttagctggatcattagcagcttcggcttctttagcagccttttctttggctaattgggcttctctttctgcctttttggctgctttttccttttctttttgcaacttcttcaatgccttcttggacaagggctggccatcttctcccaagattacgggttcagctccttcggctgtttcagcaacagcagcagaagctgctggagtttcagctggagtttctgaaactgccaacttctcaatttgttcagtagggacagacatggttgctttcctcagtaatttgagaaaaagactaatgttcatcttcaagtttagtgaaaattagtctcctgagtgaatcgaaaattttcggtgcgcgactctatcttacgtcatcaaatgacatgatccagtcatagctatatgaacaaccacttaatataagatgaatagatgatcgctgatacaggtgctttttctcccatgctgtatgtctattacttgtatattacacaacttataaatatagtacagtggttgatatttattcaaactagtcactgaaattgactcaaacaagcggttcaaaagtattaatatcaggtgctggaattgcatactgagacctacctagaaagttcaaaccctcaagggaaattgatcacaccagccaacagaagaactattcaaattataacattgacaccgtagatatatatttgggccggtgttttaaagctcatatctgtactgagtcctagttcatttgctttgctgttaaaattcaatggaaccagatcatcaagatacattttctgcgacaatttttgacctcttggctacaacttttagtagagagaaaatcactaaatgattgctaaaaataattaggaaacaaaaatgtagaaaatattcatgtaagcaaatttggatttcaattctagggtagtagctgatagattcagtgaaggacttggggttctaagaacagaaagataacatgatcctaaaggcttatcaatataagaataatcaacttcatcaataatatgagattttccataagcgatgacattattgcattatatacaaaattgtatctattgaagggataaaattttgcataatcatctaagttcttaaattttgaaacattattactaaacactaaaaagtttatccttgtttactagttttaatgaaacttcagtactttagcaaatttagttgaagaaaagtccatattttctcttttatcttaagattcaatggcaactcaaacatctctaattatattttctacattaatttcattttcttaataatcagaatttaaaatatactcttaataaatgaagttctgaattagaaatgttatgaatatcagcaggaagatatcggaaacgttcaacatttaaatcttcaagatataccaatcaacagtaagagattcagtaatagtattataataataatttaaagcaattaatggaatggtcatcagttaactttaattcataaaggaactcaaatttgttaagaatagatataactaagtattatgaaatttttcatgtttaaataaaggtaaaattgtttgtttttttcaatattaacatataaagaaagacaataaatatacaataaatatacaataaatataacatatcaacataattttctttgtggatacaagcagtcattatttacatccaataactaagatcagtaaacttgaaattattaggaacataattagtaaattcaatcttccttttacaacctttattgcacaataataattagcttcaaagaactcgacaactagtggtttagttatcactttattgaatctatcaacatcaccataaaattgtgtctaagtgtatgctcaaaacacagaaaaacaatcaaaagttttagaattttaggttcttcgtaaatcatttttacacaatcagaaattatcgaaattcaagaattcttttattttattcaaaaaattttatgaattatatatgtgtttgtatgttccatgtagttaatctcaatataagtagtgggataagacgagtcgctactctggatgttagttgtcacttttgccctaagaatgacactccttccaaaactttgggttgctatttacattcaatgcttcttaagaaagaaagagtcttcgttattaatgacttctttagcacacctctctaatatatttcttgcatagctttttgcaaatcattgccagctacttagaagactgtttgttgtcaaagaactagggagaaatccaaacagagatgccatgatgggtaatggtaacttttagctttctgtgttgacctcaagcaattcatccatgcttcaagaatttgactacctatatatcgaaaggtcagtttgagttcatatgagtgttacaactctgagcattcaatcatgcaatttcatcccttctgcgaatcggggaatgctccatgtcaattccacatgatgtccttcaaaacgtttccggaattctaattacaatgagcctacaattcatttttgaaaatgtgaatatagttgggccaatgacagacaggtgttggaccaaatttacttttacggttcattgatacatcatctttggtatgatataatccagacaacaaacatgaaattgcagtgattttaaatacctccgttttctcttggatgaaattgaacaattttggtaccttatgtagagtcacttgagatccaatcgattcttgggatggagataattttactgtgaggctactgaagttggcgagcagatccccttacaatatatcctgaaatgcatcctccaataagtgaactgtttctagatgtccttcatgaaatcttgatttttcttgaaaatagcaaccaatttttgaactctagttaatagtcttgtcctggaagtcaatatttaatctgtttacgacaattccatatcgtaagaacgacaagtttgttcttggttggcaacaaacttgttagctgtagacgaaatatttggaagtgcgagactaagctgttaagaccatctgccgaagttcttcagagggtgctacattttgttgtgataatccgactaccttcggaagtgtcgaacaatatccacctttggaatcccagtattttgaggtttgctgcaaaattcaaaatgttagcaacaaggtagagataaaaatcaaacttcatagccagcgtaacaatacatttgcttctcttctaaaatttttcttctcttaggctgtaattcttacgacgcaacttaagaatatttctaccaaaagctaaatgcatggatatgtacacgcagctgcgattcggcgtgttggcaatatgttgcaaaattcgtagtgcatcaaacattgcaatagctatcacaagttccgaccccagtgattgggagctaactataaacgagatctttcgcgatactctatctggtaccagataggtatctgttgcacttgcttttcttgactttgactatcaagatgttggttgattggatagaggacggcacctaatacaaaagtattacaattccaccagatcatttacaatcaaccgaaacactaaagagcatgccaggtacatagaagattgactcgtatgtcgcagatttgtgatacggtaacaggaagtttggaggaagtttccacaggtgaacgtacagtttgtccctgacaatggattgaagaagcctacatgtgcaaataacatttattcttcaatactaatatacgagtttcaacgtctattaaatgctattccctctccttccaaccctaatccacaaatagaagaaagcctctccacaactcccgttctagcgttgtttggtgttcgcacccagattcaacccgactgcagtagtgaggcttattcaagaataataatggctcagatcagtttccaagtaccagtccgagatggatacgaacaattgccaggaagagcaccgggactaggaaggactgagagaaaaaggggatagaaaagcaataatatggcaacttagctaaacttaaattgttttctaggagagctcagggatattaattcatcacattggtggacacttgtactcattcagttagaatgatattaattccatatacctctacattagattggtaatgcaggcaatattaaaatattagattggccagatattagttcattttggcgaatttagttcaggaagatcactccgcaaattttatgatttggagtcatataccatgttcttttagttgcatggtacaattaataaatacattccatagatagctccttttcatgagtctctctctccaagtgtccattccacttgatataagatgcaacatgactgcgcaaccacaaagcctttttgaagaatagaaattaatcagttcccccctcgtaatactgtcttgaaaaatactcggcacttttggttatcacttggctacctatactaggtccatctctctccagcacgtagtgaactaattaattttgtcactgggcaacttttagttagaagatttaaatggctcagaagacatcaaattctctctagttaattatttcagcccatcttatcttcgttttgtttccattccctcccttcaaagaatgaccagttttttcaacacttcgcatcttctatttggttccatatcctcttaagagaggtctcgcgcgacgcactgcagagacttcgcactacatgcatcctattaaggttggggcttagaccagaaattatagtgtagtactatattttcaacagcaagggttcgggcaaaaacttcgattgccctaacgacgaaacccgcctttcgaaaacctgtcacatcctgaaaaccagtcaaacctcacattttcaggagaaatacacgttgttcctcctcctcctcctcctgctggaaggactcgtagatctcgtattttgaagtcagacgcactccacctgcccaagtttatgaggtgcttggcaacatcagatataggctcgtctggattcgtctggattcgtccagttttatctggtttgagtttctgtgtggaccagaagtttagcctgattagtttaatgtgttttctgtcgttatttttcactcgtaaatattataaatgcacaattattttacatgcattattttgaagtctaatacgatggtttcagccggatactgcaaaatttggtctagatatcttcgtattctagtaacaggatctttggagaatttttctctaagtctgtggaacgactttaatatctattttttttaaagaaatcaaggcttcaggtatagaataaacccaatgatcttatttaaattatggaattccttcatagttacaaatggcttgtaagagcaacggttctcaaaaatgttgatctccgccttctgggtactactagcgctcctaatcccaagatcgtatgctctcttgattcccacgactacgacttgggataatacatatagatcaacgtcaatatccaaaaccaccattgaaacaactaatagtcttggtaacactatcctggttgtctatacctataacattttggaaataccaactccaactgttactgcaaagcaaacatggacaggtacaactctttctgtaaccactatcttcccaaccgctgaaggacaaaccgtgtctgttgttactttattacctcctgcaaccgtcgttgttacttcaacttggacaggaattagagaaacaagcacacagttaccaacgcaagatggggataaaattacaaaatacatcttgattccaattccaactattaccactagaataacaggaactggtccgctttcggttgttaccataaatgctatcgaaccaggtcaaacaggaactgtgataacttacttacctccagccacggccgtgctgaccagtacttggactgaaactttcagaagcacagagattttttcaccaacagttaatggggacaaaataacacagttcatatatgttcccactccaacggtgactgtgagatcaacttgggaaaattcaattacctcaactgaaatatttgatccatctgttgcaggtggaaccattactaaagtaattgatgttcctacacccaccgttagagtagcttcgtcgtggttaggacctcttagtacatctaccatctatccctcaggtgaaggaggaacagtcacagtcgtcactttgttgcctcctaagactgtgattgtgacatctacttatggtgactctgtcgtttccacaagtgttgaaaccgccctggtacttggtgatcccgcaattaaagtcatatatgttcccactccaactgtgactgtgagatcaacttgggaaaattcaattacctcaactgaaatatttgatccatctgttgcaggtggaaccattactaaagtaattgatgttcctacacccaccgttagagtagcttcgtcgtggttaggacctcttagtacatctaccatctatccctcaggtgaaggaggaacagtcacagtcgtcactttgttgcctcctaagactgtgattgtgacgtctacttatggtgactctgtcgtttccacaagtgttgaaaccgccctggtacttggtgatcccgcaattaaagtcatatttgttcctacgcccaccgccagagtagcttcatcgtggttaggacctcttagtacatctaccgtctatccctcaggtgaaggaggaacagtcacagtcgtcactttgttgcctcctaagactgtgattgtgacgtctacttatggtgactctgtcgtttccacaagtgttgaaaccgccctggtacttggtgatcccgcaattaaagtcatatatgttcccactccaactgtgactgtgagatcaacttgggaaaattcaattacatcgactgaaatatttgatccatctgttgcaggtggaaccattactaaagtaattgatgttcctacacccaccgttagagtagcttcatcgtggttaggacctcttagtacatctaccgtctatccctcaggtgaaggaggaacagtcacagtcgtcactttgttgcctcctaagactgtgattgtgacatctacttatggtgactctgtcgtttccacaagtgttgaaaccgccctggtacttggtgatcccgcaattaaagtcatatatgttcccactccaactgtgactgtgagatcaacttgggaaaattcaattacatcgactgaaatatttgatccatctgttgcaggtggaaccattactaaagtaattgatgttcctacacccaccgttagagtagcttcatcgtggttaggacctcttagtacatctaccgtctatccctcaggtgaaggaggaacagtcacagtcgtcactttgttgcctcctaagactgtgattgtgacatctacttatggtgactctgtcgtttccacaagtgttgaaaccgccctggtacttggtgatcccgcaattaaagtcatatatgttcccactccaactgtgactgtgagatcaacttgggaaaattcaattacatcgactgaaatattggatccgtccgttgcaggtggaaccattaccaaaattattgatgttcccacaccaacaaccactatcagatcttattggactggcacgctttcggtaacaactattcccgcagggcctggagaaactggaacggtgattacctatttgccaccattgactgttagtacaactttaacgtacagtggaataactccttctacaagtattgattctgctattgttaatggagataaagcaactaagtatgtcttcatcccaattcctacaatcacaattacaaatacttgggaagaatcatatggtgttacatctactatttccgcagcaccaggagaaacgggtacagtttttgcgaatgtgccagtaccaacaaaattagttacctccacctggctatccagtaatatttcaactactacgatacatggagaacctggacatacagcttcagttattgtgttccttccaattccaacaacaacggttcagagaacttggacaggaacaactgagtctataagtacttcggtggttaccgtgcctggcaaaacagcaactgtatatgtttatgatcctattccaacaactactataaccacctactggactggttcatttgtcagaagtagtacgacaagagtcccagttggtcgtacagcaaccgtttttgtgtttgaaccagagccctcttcatctatctcaacctctagctctgagatcgtcagctctagctctgaagttgagagttcgagctctgaagttgttctagtttctagttacggttctgaatatgctaattcgagctcggtagtttcgtcaacgtctgaaatcgtcagctccagttctgacattgttagctctagctctgagatcgtcagctccagctctaacattgttagctctagctctgagattgtcagctccagttctgaaatcgtcagctccagttctgagattgtcagctccagctctaacattgttagctctagctctgagatcgtcagctccagccctgagattgttagctctagctctgagatcgtcagctctatctctgagatcgtcagctctagctctgacattgttagctctagctctgagatcgtcagctccagccctgagattgttagctctagctctgaagttgttctagtttctagctacagttctgaatatgctaattcgagctcggtagtttcgtcaacatctgaaatcgtcagctccagttctgaaatcgtcagctccagttctgagattgtcagctccagctctaacattgttagctctagctctgagattgtcagctccagttctgaaatcgtcagctccagttctgagattgtcagctccagctctaacattgttagctctagctctgagatcgtcagctccagctctaacattgttagctctagctctgagattgtcagctccagttctgaaatcgtcagctccagttctgagattgtcagctccagctctaacattgttagctctagctctgagattgtcagctccagttctgaaatcgtcagctccagttctgagattgtcagctccagctctaacattgttagctctagctctgagatcgtcagctccagctctaacattgttagctctagctctgagatcgtcagctccagctctaacattgtcagctccagttctgagattgtcagctccagctctaacattgttagctctagctctgagatcgtcagctccagccctgagattgttagctctagctctgagatcgtcagctctagctcggacattgttagctccagtcctgtagttgagagttctagttctgaagttgagagttctatcactaaggttgaaagttccagtaatgtggaaatacctatttcaagttctgcaataatttcctcgagttcagaagaggtttctagtccgcggttgacctctgaaactggtagttcaatttctgaagaactgaccagttccagttcaagtgttgaattggatctttccagttccgagctcccttcttcacctagtttgagcaagtctgattcatctagtgtagaagtggcaccttcatttagtggttactatagcaatagctcgataaactacccagaatcacagtcgctgttcacttcgttatccagttcatttccatttatcccatcttcattcagctcaacttctgaagttgagacctccacttctgaaatagtttctagtcccgtgtcaacttctgaagttgaaagtttcagtactgaaacgatctctaaatcagaagtgcatatttcatctgattcaagttcacaaattgatacttcaataagtagtaattcagaagaggtttctctacctagctttagcggtagctcgctggacagtattagttccctgactatagctgaggattccagttcttcctttgttccttctacttttgttacttcttatgtttcgagttcagttattgacgatgaaagtagttctccaaatgaaagttctacaacgactccgattgttgcagatataactttgacagttcgaactacctggactggttcttacaggactaccacaacagtacaacctgaagttgccggaaatccagctattgtattggttgaagttccaacgccaacagttacaactacaatgcaatggacagagtattttacctcgactagtacaaatcaagctactggagaaggtggaacagctactaaatacattttagttccaccagtgtatgttgttcggacttcaacttggactggtgttggaacttccacaactactgcttttggaggaggaattgcaaccattattgttgaagtaccaattgcaacagttacgacaagatcgacttggaatctggaaggttcatcagttactactgttcccgccacagtccctggagagacaggaacggtgattacacttttgcctgctaaaactgttagatccacttctacttggaccgattcagtcaaatcaacaagcatagcctatggttccaatggggatagtaatactgaaatagttttaattccgactcctaccataacaagtgtccagacgtggactggtgtgcttaccaccagtattgtacctgcttctgatggacaacctgccaccaaattggttcttcttccaataccaaccattacttctagatcgacttggggtggtagtgaaactatcacggtaacaaattctgcctcattgccaggtcaagtgggtgtagtggttattcaagtccccaccccaacgagagctacagtgatcacatgggccgattcagtaaggtctaccgaagttgtgagtgcttctgttgaaggagaaacagcgcaaaggaacatttatgtacccatcccgacttcttccgtgatatctttttggacgaatgaagaatcatctacaagtattgatccagcagttcctggaggaactgcaaccgcatacgtatatagaccaccgcctgttgtcaccagaaggtcaacttggactggatcagttagatctgaagttaccatctctcctacagcagacggcgaagtaacagtcacggtgattaatttgttgccgaccccaaccaagatagcgacatctacatgggccaattctgttaggtctacggaaattattagtgcgtccgttgaaggagaaacagcacagaggatcatctatgtaccaactcctacagtaacatcaatttttacttggacatcaacatccacatcctccaacgttatcccagctattgaaggaggaactgccacattgaacatctacttaccagtacaaacagtcacaggaagaagcacctggacaggttcttttacttccatagaaactattgcggcattgccagggcaaacaggaagtgttataactttcatacctgtaccaacagttactcgtagaagtacttgggcagatactgttacttctgtagtaacagttacggcagcaccaggacagacaggaagtgttataactaatttgccaataccaacagttactcgtaaatccacttggttgagcagttatacatcaactgaaacatcgagtgccactattcctggacaaacaggtactgttcttgtttatgttcctataaaaacagtgaaatcggccgaattttggagcggaacttttacaacttcgactactgtgactgccgatccaggagaaacggccacattgattgtttattatccacctccaaagactaagattgtttccaccgtctggaccggtgcaacagtgtcatacagtactgatgaacctacccctggcaaagtggttacggtacatgtgtataatccagctccaacatgaatcgtttgatggttcaagaattaagtttaatctctgcttagtgtgtttttgttcagcaaaagttggaaagaaggcactattttgagcacggttacattaggatgtattcgtattcgtgtctagggtctttcgttaccccatttcatttttctgtttttcttcatttctttttttgataattttcctgttttaatttctttcccattttgttgtgatatcggataagtgctttactgatcagttcaaccaagtttcgatttagtctaggtttaaatgttctatttagtaagccataaatataagcgttattaccactctagagagatgtaatactaatatattcgtaaaatgctaacgttcaggaaaatgatttccactattgcaatagctttgtcgcttttgatatgttatgtacaggtgtggttgcaaaatgaccgaaatgcagaaggaagcatggacctgcgcgcttaaattggtgcagagataagagtaaaacaagcaaggcttcacaaaacactatatcatactactgcatgacatcggtgcagatttctgttattctgatggcccattttcacagaatcaacatagcgaaaagttggacttctaccgtgttgcatcaattctatgaaagaaattgcagtaactaactaaataaccaaatccattttgaggaggtgtgatacgcaggtacaaaagtggatgtggaagaagaacatgaactttattttttattaaaacaggttcttcatatattttatattttcgggaaaatctcgtgccaatgatagttctctagttaatattaaattttttggatttccaagtcttggtatttcaatgaatcaagatagttagttctctactgctttagaagctccaggagcatgtgtttatagtatcaggaaggaaacctgtatgcaaaaaccggttgccttttagacttttagggctggagatttcgactttgtatcaatcattagtgaactcctcaaaattctgtataattcacataaatctgaatgtggtttatatgttcttcttctcacaatacattttgggttttctcctgtacggtttcagtctttgttagtatttgtaccaaaccaaagttctaaaccctcgttatcaggaatgctttatcatattttccatcattccaaaaactagattagaaagcgtcaatacgatgcatccaccaacttggtctaggcatactatgcagtcaacagaacactttttattttcatgactggaaattaggatttagtcttcagggcgccaaggtcccgatttcgtaaatttacgatttgtttcattccacagtttttgcttatcgaatagcatttctcccagattttaagcgatcgacgccttagaaaatttcttatttcgatcacctagatttttaattttgttcggcggattgcatgatttaagcccttgagcgagaagcctcgatggggtttaattgaattcgacgatccaaaacattctaatatttattttttgacagttaccagatcatttaatcattttcttcactaagaaattcgtaaaattacaaaagtatgatagcaagtagaataccaagaatttccatacaagtgatataataatgaccgtgaatacgataataataactttttagccatggttaggaaagaaccaaaaatagtcagatgtggatcggtacagcagttgacgatttagtaagatgaaatttttacttgagctcgtagtagagaactctttcggccgcagcaatggcaatagatgtggatgcttggtaagttctgttcgtattttacagaatactggtctcacacatgtcgtagacattggacgcaaaatgctaatgccaatccttagtccccttcacttatatactttaaattcctcttatttgcggaatgttatcaaaggttggttcgcagccagtagcatctgtaatttatcacaatgttgattcagagacttcttttgttttcctttttggtcacaaaggttgttcccgcttatgtcagaactacttatacttgggaaagcgatatttcttccacaagcacagcagacagcgctttttcatttctggcttatatcaaacccaatggttatccggacacaagttattttacttatattgaaatctataaaccatctccgactacaaaggtaactctgacttatgatggtctagctcgttctacctcaactacaaatccaagtattcctggtggcactgtcacggtgattaactatgttccaactccaacagtagtcgtcctgtccacttggacaggtagtaaacgctcgacttctacagttctggctactttaggtggatcagtaacaaggatcattttacttccaaccccaactgaaactgactacattacttatgatggttctatcacatccacagtcaccatcacgggccccccaggaggcattaacaccgtacttatacaattgcctacacctactataacaaattattttacttgggacgaatcaacaacttctatagctattgtaagtgcaacagatgaaggaggtactgcaaccgcaaatctttacgttcctactccaaccgttactaccgtctcaacctggctagagtcaggaacaagcttaactactgcgaatccaacaggaccaggaggaagtttcactgtatacaatttagtaactattccaactttaaggaagattgttacttatacagattcaactaggtcaacttccactcactttcaagcaacagcacctggggagacaggaactgtgtttatatatgttcctataccaactgtaactcaaacagtaacttgggctgattctactacttctaccactacggtggctacagccaatattggggagacaggtaatgtagttctatatcgtccaactccaacggtgacaagaagaaccacttgggaagaatcgtatggtgttactaataccgttccagcaacttcagaaggtgaaacagggtttgtttatattaccttaccaattcccactaaatattatacagatacttggctagaaagtgaaactatcacttacgagacatctgttgcaaccccaggaggaacggcttctatttatgtgcatgtcccagttccaacaaaaacgtacactagaacatggagtggtaccactatttcatactcaacttcaattatagggtcaccaggtctgaccggccgagtttatgaatacgttccaaggcccccaagtagttcggaaggggcaagttcttcgtctgacgttgcttcctcctcgtctgtggttgtctcttcctcctcgtctgtggttgtctcttcctcctcatctgaagttgtttcttcctcatctgtggtggtctcctcctcttcatctgaagttgtttcctcttcgtctgaagttgtttcctcttcgtctgtggttgtctcctcctcctcgtctgtggttgtctcctcctcctcatctgaagttgtttcttcctcatctgtggtggtctcctcctcttcatctgaagttgtttcctcttcgtctgaagtggtctcctcctcttcatctgaagttgtttcctcttcgtctgtggttgtctcctcctcttcgtctgtggttgtctcctcctcttcatctgaagttgtttcttcctcgtctgtggttatctcctcctcttcatctgaagttgtttcttcctcatctgtggtggtctcctcctcttcatctgaagttgtttcctcttcgtctgaagttgtctcctcctcttcatctgaagttgtttcctcttcgtctgtggttgtctcctcctcttcgtctgtggttgtctcctcctcttcatctgaagttgtttcttcttcaactgtggtggtctcttcctcttcatctgaagttgtttcctcttcatctgtggtggtctcatcctcttcatctgagcttgtttccttttctaccgaagaaccttctgaggacgttcccacaagttccgagagtccatctgatagtccatctgaaattacagttggttcgtcggtagactcttcaaacacttctgaattcacttcaggacattcagaaatatcgacttcagaaacatctattacatctacccctccagtaccgctggacgatgggtttatgatagaaattatagacgtggataccggtttggatgtgttccttgctcacgatggtaatgtaataacattctcaagttatactggttccatatttcatttgattcttcctgaaggattccttatcgttgataggttatatgttcatgctgataatagtggaatttacttgagtgagattccattcggtggttggagcatttcttctaatagtaaaaaatttgtcaaacgagggggtataggtgttttactggttaacggaataagcaccttctacctctgtccaaatcaaaactctctcttgtcgctttctgatagcggaggttgtcaaaaagtttcgtttctggcaaacgaggttgaacctaaccaatcttcgtcgtctgaactaagctcagaatcagaatcgagtactgcttcagcagtcagttcttcggttatttccatatcagaagttagtgaaagctcaggttccgaaacaagtactgcttcaactgtcagttctccagttatttccatatcagaagttagtgaaagctcaggttccgaaacgagtactgcttcaactgtcagttctccagttatttccatatcagaagttagtgaaagctcaggttccgaaacaagtactgcttcaactgtcagttctccagttatttccatatcagaagttaatgaaagctcaggttccgaaacgagtactgcttcaactgtcagttctccagttatttctgtgtcagatgttagtgaaagctcagagtctgacattgcttccggtattacttcaagtacgtcacctcagcaatattcttcagaaaatatcatctcatcttcaatcagtgctttatcttttggtcattacagcaatagttcatcgccatctgtatcaagttctgagacattttataccttatcttctacaccatctgtcataacaattacgcaatcttcactaggttcatcgggttcgattgcatcaactacatcagtattaatatcagtttcggctacttctccaaatgaaattgtaacgccatcattatcgagttcacttcctaccccaccaactggaattgtaaccccatcattgtcaaattcacttcctacttccgcaagttcatcacctctcgtcgaggaaacaaacttcagattgcgtgcagattcagtcaatcccgacattaattttgaacaattccttacacatattggtcagttcataacctttacgaatactggaggagatacattccacttatctcttccatttggataccttactgttggtggactctatgttattgctgatagcaacggctttcatttgggaagtcaaccttttggcaattggaaagagactgcctctcctgctattcttgttaaaagagtagaagataattcactcctgttgaatggccaaaatgttttctacgcgtgccccgatgctacacctgcattagaacttgttaacaacagtggatgcattccagtaagtttgaaaattgtagaagaaggtccatcccctgtcaccgtttctacaactgaaacggaaactgtcacaaatacttttgcatctgggagcccgggctcaggtgaaggatcgggctcggactcgggttcaggagaaggttcaggagaaggctctggctctggctctggctctggctctggctctggctctggctctggctctggctctggctctggctctggctctggttctagcagtggcagtggcagtggttctggttctggttctggttctggcccaggagaaggctctggctctggttctagcagtggcagtggcagtggttctggatctggcagtggttctggctctggttctggttctggttctggttctggttctggcccaggagaaggctctggctctggttctagcagtggcagtggttctggatctggcagtggatctggctctggttctggttctggttctggcccaggagaaggctctggctctggctctggctctggctctggctctggctctgcttctggttctggctctggttctagcagtggcagtggcagtggatctggatctggcagtggcagtggttctggatctggcagtggatctggctctggctctggctctggctctggctctggatctggatctgaacaaccacaggctggaggacctattgttcctactcctgtgatcactataccaggagctggaactactttgggaacatccatagcctcatatgttccttctattccaaccgtttcaaattctccaattggaggtgcaagcaaaattcgcctaactccaataattttaatcttgatggcgcttgtccatattctttgaaatactgaatttatcgtcctttcggttccataactttctttgcctatttcgttaatctattttctgtactttcgcaacatctgcaagtggaaaagtttaaaagtccctttaaatatgagactttctttatttttagagtatatatcaattgaatctttcatgtctctagattgataatatgtagagccgaaaagagatccttctccattctgttttacatattcaataagaagcttgaagcaagaatcgacaattaaagttgaagtatacaatgtaagatgacaccaaactaaagttaaactagctgcccgtatttcttaccgcagacaaaagtgcattgtaatggtatggatcacttgctttcacacttttgcaattagatggatgggcttcgtacacttttcatgtcgtttggattaaatttctttctgcaagtgatgcttaagaataaaatcagcttgttcctttggcatttacattgttttcgcctaaagcagtttcgcttgcactccatagataatttgcctactccgattcactccagactagaaactgattgactacagttagggggatctcccctatagttgggattaccatttgaatgaattgtgccccattcctcccatcacttagcctatattcctcaatgtcacggatatcaaagaatttgttattacgatgatagttatggatagagatcaatgaaccttagtttcatcctgataattagagagcacgcggacatggctgcgatacactggcattgagcaagttagatgatcagtaaatgaaacaagattaagttctcatcaattgtagctgtcgaagcctgtcagtttatcttcagcatagagagcggtccctaatcctattgatggaaacctgcatgcagaaaccggtccttttggatttataaagttggatttggaccttgtattatccacagaagcatataaatgtagttcaagctaactagtatatgttgggatttaaatactctccttctctattatcatttgggttgtttatatatcgagtacaacaaatttgagacctggagaaataagaacatattcattcagaggtggatctctccgaaaccaatattataggaatcctgtattttatttttcatcactattagagaattagctgctctgccagactaacaaaacggcaagcatttcaacctgaaaattttcaaatcgatttgaataaggcgaaacttctatcttagatagtgggtatacaatggtatcaattttgttgttcccttaattttttctgttgatggactttttctgcatttttttctagaaataagggcaccattatttgaatataaaataaattcaacggaatgtaatcactaacaattgataaaatttccacacagtcttcgtaattttatcagttcaaatctacacctttaaattgttttaattcctatgggaacacatagatagatttaattccactccatatctataaatattacgtaatcgatgacatggttcagaggtccatatacaggactaatatgagtcttatgtatcacgtgattttctataattctagatagccaacttctctatcttattgttcaactcctcttgccgctgttgctcttgctgcttttgctccttctcttttcgtttcttctccttctgtaatctaactgcttctcgtatttccattccttcccggattttgcgttctcgtctctgttcttttgtctctgtaacctcatcgatcttctcaacttggttgaatccagatatagccttgtacaactcgtctatcttcttagcattctctttgaaacgatcctcggcaagttttgtcaacatgctcaaatacgaagtactcacaacggaaaccaacctgtctcctttcaagtacccaatgggagtgtcaagcttgatggatattctgatagctacaacgttattggatccgattcctgattccctgaacccacaattcatggccgcagtgtataaggcagtagccagcttcaagtctctacactttacatgaagtataagaggctcaaacttgaaaagaatatagcgtgttgtgatgtctaacttctccaactcgcaactttgttcgtattgaaaatcaacctgactatcccagttttttaactgattcacgtcgtgagtgacaaagatccatctaccatggttacctttggctccgatctttgtatcgtcatgtcccacattcttgatcccttcaaggaaaactgatactcttcctgaacacgaagaagtagtcaccatatcattgtgcgagtttataagttctattatgggaatacagagctcatcgatagtaccctttggagaagcatcgggagagtcttcgttggtggacgagatctccttcaatatagaaactttcttctggtcaaacgggtctaacattctataatacagccataatcaattttatcttaatagaaaggaaaataaagatatctcaaaaattttgtactgctactatctaaatttttggttttgtgtcatatgcgaaagtacatagttagaaatctactacaatattctacttcaaggcaagaaggaactttctctcgtcgtctgatgagaagtggaaaagagtcttgatcactggaagcaacatatcacgttgatctttgtgttcaaagaatccaagaagaacattttttagatacgccgtattcgtctctttctcttcgttggctgcatcagacgaactaatagagccaccatccgttgaagctctcggagaactcaaggtgtcagtggaaacatcataactagatgctggtgatgcctttgtggatttcatttgtctgtattgttgagttatgatcttgtagttcttagataatctttcaaactttaagttggattcttcgttcaacttcttcaacacattgttcaaatgctcatagtcacgaaccttctttgtgctgagttgcaaagagttgcgcaacgtttcaattgtctgctgtacttctccacctcccgtctgaccatctccagaagaatttgaatttaaggaaacgagttcagcattcttttccttcaaatcggcaatattcttctccaactcatgtatatcaatacggaagttttcagtactcgatttcaattcgtcgatttcccgttgtctctttttgattaaagcctgacaactggtttcgatctggattttttcctcggcaaactttctgagctcgctctttaattctgtatccttcaactttaattgatcttctgcatcaacaagtaaacgacgtatactggacgactctctagttctttcctggagcatgtttctcgactctgaaagttcgtcctcaagattctcaatttttaaggaagattccttcgtcttcatcgacaactcttcatattgctgcttgaaaatcagatattcattggtggaactagaattttccttcacaagaatttcaaacttggacttcaatttctcgagttctgttgctattgcttgtttgtcactttgcaatttggcaatttcattagttaatgaattcgttcttactgctgccaactcttgtttagtcaccaagttactcttttcttccaaaagtgacttctgcaacatctggaattcactgttgttgactttcaacttggatatggattcgtttaattcatccttttgtttggataatgtttgtatttgctctttgtattctttaatctgcagatctttatgctgtaatgaagttttgaaagatgcaatttccaacttgagcgaagtgtcattgctcttgaattttgtaagttcattgattctggcattcaacccttgcttttccttggtcaaagtttcaatttctctattggcacttgctagttcagacttgagcttcgcatgttcttctttcaatgaatcattgtcagatctcaatttgttttctgatatcttaatagcatctaacgtcttcatgtggtttgatacttgagtctcaaaatcgctagcttttctttcgtgctcacttaataaagattcaagttgtttactcttttcgtttgctttcaaatcaagatctttgttgctctcaagaagcttttctagttccgttaccttttcagacaactccttcgtgagtttatcattttcgaatttcaagctcttgaattcctcggtaccattggctgtcgaatcagatgttccaaatgatgcctttttcaagtccttaatttcatcacgagcttggacaagatcatcgcccaaatctcttaacaggtctctcaagttttctacgtcgtctgttttagtttgcaaatcagttcttaatcttctgttttcttcggtcaaactctggtttgaagttttcaattctttaacttcaacatgcgattcaacgagttccattggttcctcttctgctggaattgctatgccaccctttttcttcttgttgttcttctttttcttatttttatttgtctgagaagctggtggatggaggttgctgttttctggggtaacggtagaaacttgcttattctgcaactctgctttaaggtcattgatttcattctctttaatcgacaacttatccttgtattcatcaatctccttggtgagattgtttttttcatcttcaagtctactttgatcctccaacttctgttcaagctcttgaatcttggattcgtagccagtgacttgatcctccaccacagcacttgaagtaggctcctgttcaattttcttcttcaacagttcgatttcttcagttctagcctgaatttcgttcgaaagactgtcaattttttcatcctgatgcttcgctgaagcttcagatttagtgagagacaagtccttggattctatctcggcctttaactttgcaatcaattgctgattttctctctcagctattgccttagcttctaatatcttccttgactctgcttggagacttttgacttgttcgtccaattcctttattttgaacaaagaagccttttggatatcgttactctccttgagcttggtagtcaagtctgccttttctgatgataaagtagcgctttctttagcgaacttcctcaattctgtgttgagaagagtctttttttcgttcaagctattcaagtattccaccaaggtgccagcctcagatatactggaaactggtgtattttcctgtaacactctctcgaatgctctgatcaactcgcctttcttcttttcggtcttgaacgcttccaaaagtatcggatacttttcttcatactttgcaaatttcttcatcttggagcgtattactgggggaagtgagttcaagtccaaatcgatacttgctttagggctatttactctggcagaaacattacctattgacgcctgtgaacctggaattggtgttatatctttcttgatgcctgaaattggcacactttcacttttcaattcattgttagtttcacttgtgattccatttttttcagattcatcaccaacagtattggaaccattgacgggttcgtctccatgagaatttaggggagagtcgtggctctttcttccgttgtcaattaatttcttctcaggttctggcgttccatcgttcagaagagtttcatcctccggctgagtcaactcgctggcatcgggagtttctgcgtttaatatctttgctccattcttcaaatcagttaggacttgtgcccgtcgttcattggcattgtggcccgaggcattatatccttcagccacttcgttcaaactcttggtgacatcctcggaaaacgctttaagtttggagaacatcccgaggtctcctgttagaattgactgatgttaagaaaaatagaaagaagtgaagtattgaactatagtggatcaaatccgatctgaaaatgttggaggttcacccccggaatatgtgttgtggagctctctttggaagagtggtcacgtgagtgttcaatcccggaattagtactgtcactcaatggcaaaaggctccgctaagcattttctgcaggttgagatagccacttatcaccattcactgtgggaactgcatgttctcctccagaaactacagtttattgtcgtttattatactgaagatctattttaagtctttctaagttctggtattccatacaaattcactctctgacaagagaaaacgctacgaagttctgaaaattcgctagctcaactcagaaagtcccgtataacctttcagtcttttcaggaaactaatttcgtttcaaatccgttccaaattacaattatatctgcgccttctcagatattacacttcccataccattctagatctcgatggctccttcgatactggaggtccgagcttcgcagtctaaaatcaacgtctatttagatgagttgaactcgaatctcgaggaaagggaccggttagtagaggttttacggctaactccttctgcaaacgataactacgagctaatcagcctactccagaaactcgtcaaatacttcaaatatctccaacaggacctcatatcgttgatcaaggtaggagagaatgtcgaacagtacataaatcagttccgggaagctgtagccaaatatgaagacgtgcacgagaaactcgcaggggactcttcaatcagtgtatccgaataccatttcacgcccgcagaatttccacaaagaaagacccccatttcagttatcagtgggtctggagctgcccgtgaagttctgaagtccgtgcgctttcaggaggacattttagataaggatgctgacgatcatttccgtaacgagttgatgggaacaagaaatttcaagccttattcggacgaggagtcttctaacaacacagattctgagtcgttcgatgcccagacgaaccaacatctttttgctcaacaccaacagactattctagaacaagatcagagtctagatgtgctccaccagctgattattagacagcataccatgggccagagcattaactcggagctcgatgaccatctcattctcctcaacgacttggagaatggtgttgatgatgccaattaccgtttgaataccgctgccaatcggttgcatgaattccggaaacgggttcgtgaaaacggtagtttggtcacaatcattgttctcacagtgatcttgataatgttattggtggtgttgaattagagtaatagaattgtagatctcttagcatatactgtattactaggtagttgcttcatataatgtatgtgtttcatactcgttgacttgtagcatcaattttatagactagtaccctacacaatacattattctacttatctacataacgattgctacaattcacatatgttctatgtcattcattaagttttactaggtatactcgaattaccttatataatcgctgtttttacctctggcaatctctatctttgtacatacatttgtcatagtatatgcttcgtctctagaagttgaaatcgtcattttcgtcctcatcttcgctgaaaaaccagataaatacaacaatgtctacatacacgatcaaccctcccgttatactcatcaccatggcacccaattcaatcaatctcgaatggtaaaacgtcaacggcaatgagatcccactgacaatgaaaaatcctgtcaacagcttgcagaactcttgaacaggtgaaggggcattgccgtcgttattattgaaagttaggaaattgtctcgagaagcatctattgacgacgctacgatgttcggcaatggtgctaggaggaagattagtatcacccataatgtcttgtaactgtcgtagagagcgcatgacaagaggatgagaaggaaccctgacgctaagaacgccagaaggaaaatgatcttgttgagaggattcattgcttcaagttatggatgctaatgctctgtgaattgcgtggagaatacagagtcacgattcgttatcgtaccctggaagtttagatgttgttcgtggtagcttgacggcatctatacaggattactcaggtagccataccgaggattgagagactggctttatccagagaaaggaaagtgtaaggaattccgagagatataaacggtataaacagctctcgagaaataccactggatgttttatattcaatttacacttctcttttatgcttgcaagtaagtagattcttatccaaaaggaagccgctagttatacataggactgtatatacactcctttttataaagtcacgtgaatgataccgggtggcttacaatcatctgatatgaggtagacattatgttcatatacagggtagaaaagcaggatttagccgtacagaattagacgggaattcttcttacatatcaggctgcttctcggagacatcgatgatacaagtggcggtcagaaaagagcgctggctacatattacaagaaggtacttctcttctttgcctcatgagattttaatcttgaactgaggtaggactgtatatattcccatctgaatttgttcatctgccgcagcctgggtgcaaaatctttcttatcattgagtccatggacaacaataaatcaaatgtggattggcttgaagtttctatttagagccaaaggtcagctatactgaccgttattgcattcaccacatttttttctgattctggcggagccaccactgcctcctttttgatttatgcctctaatcctatgtgaaccgagccgagccgataacatacaccacacttatcatattttcacctaaaatttgctttcctatctatcttgaccactagcaattgttattgttcccctcctatttactgtagtccttagttgcatagatttcaacctcttcctagctctctatttctaatcagattgtagctggagccacaatgttccagaagtgtctgtgtgcagaaaaaaacgcaattcctacctggtccagtatgctagtcatcgggaagctaaagacatgacaaatctcattcaatgattggaactgatctgagaacgacatctgtatatatgtttcttttgaaaaccctttagtttagttcattaaggcatctcttctggccgactttgcaaccacgaatatttcactgctttcacatttttcagttgtccaacttcaccaatgaagacaattcccaccgatttcagttaacatttcaattacttccctcatgggcgacgccagtgattctgctactgatgaggacatctcgacattcacctacgaagagggttcttccaaaaaagagactttctcagctaaattgaagtatcttcttagatacgaatgtgcagataacttctctccagtttactatgtgtccatcatgggcactggtgcttcttccaatatcttgtacaacttcccctatccagcccattggcttcaggtatgtggttggataatgttcagcattgctgtacttttgttgatatccacttcctttatgacactagctggtttttactaccatcctaagagaatagtactgtaccacacagatcccaatgacgcagtgtatatgggctgctatgttatgggatatatcaccatcattaacttcgttcatttggttttaggaactcgccatattgcatttgtatgggctctttggtggatcgccattttcatggcagtatacactgcttctataattgtatttctttccattttttctaagctcaacaagaactacgatccacaggaagtcactgccatatttttgttgcccatcgtgactctcacagtggcttcctctaatggacatttgctcacaccaaccttgccgaccttacagcagcagattattaccgagctcgtcagtctcatgatctggatgatttccatagcccttgcatttattgtcataaccatctactttgcacggttaatcatttacaaaatccccactacggatatgatattttccagctggttacctgtgggattcttgggccagagtagttatagcatcttgctcttcggagtgaacatgttcaagttgatcccagatccctacctcggccattcattcctcgtcacgtcagctcttgttgctttatttctcatgtcatttggctacttcatggtattcatagccgtaagttcacttctttctaaaaccaagcccttcgctaaaaatcccaatactgcctacactactacttttgggaccatacgttggagtaaatattggtgggcggtgactttcccctgtggtaccatgtcgttgtcaaacctcgaaatctcgaaagggttcgtgggaaactatgaattgccttttttcagagttatgagctgcatttttgctttaggaatgttgactatcacggtcacatgcttggttggaatcgttatttatatcgtcaaacgtgttgcaagactctttgacaaactagaccataaatctatagtataaaaagtatttcatcatcattaatagaattgattttgaatatcgctgttactgattgcacctcattgattgtttcacgtagacttgagattgggtgcaaaaaatgatgcagcgtaacgttaacaatccctacatactgcaaatagtggacgcaaaatgggtgcaaaataaagtacaattttcctgtatcgtttatttacaaaatcactccctaatccaaatacaccaataacgtaaaaacaagaattacaactagtagaaaaatcataataaaaaaatccgagttctccatatagtctcacctgagacagggtctgaactggagcttgaacctaaaccgaaacgacgccaaagatgaaccttagtttgtcttagttctttgagttccagaaccacccattggtgcctttactgccagaatccaattgtgggttgaaaaccgtatctttaccattttcggaaacgctttctttgacagttacccagtctttggcatcaagaggtctggttttcaaaattgtctttgttaaagacgtgccgtcattgaatgattcagtcttaatttccttcaattcaacctcatttgtttcggaattctgggtgtagaacgattggtaagagttggaaacaactctcctctcgttactgtcagtttccacaggaggttgagcctgggactggacttctttagccgtcttgactctttccaaatatttctttctagcctcttctctctgttggcgaagattggcatacatgatgttcttccagctcaaataatcgtcaaactttctgaagaaaacacccttttctcccaagtcaatcacccccttggaagtcgtttcatctacacccttctctaggatagcattgtccaagtcctctttagtcaatatggtgtttctcaacttctcttgcttgtagttcaacaattcgacaggcacttctctgttggggaatagacatctccagtagcctctactgtcccagacagattcaccagccttgttcaagcagttattgtatgctctagtcagtggtgtcttgtatgcatagtagccaaaaggagttcttccgttgcggaacgagccgctaattaagtccaggaaccgcccgccatagaaatcactgattcccgttgaaatcccgtcatagccaccctgattacgtttacaccaagatgagtggatagcgtcacgtgtctcgtacggcttgggaaaggcagcatcgatgtctacatccatgccggtggaactctcttcaagctcggaaagaacagtgtcaaagccaacatccttcgatgtgaagaagtttctcacgttcttgcgcatttggttcatgtggccggaggaatcgccatcaacatcaaaaagccaattgaacgagtaatctttggcaaaatcgttgaagtcgctgaaagattcgtttgtcaagtggaagactgatttggcaaaactggaaacgttttgtttgaagtccttgatgttttcgaccatcttgtcaaactcctccttattatgtacttcactgttagcagtcttggattcactgttgaaaaagcatttcctgctgccattactgttgctatcgccgttagattcacaggtcatcgtggcagtgttggtaaatcaaatatgttacaattgccagaattgacacactcaataaagaaagaaatcaaattataatttatctttgccatcaaggatctccttattatgcgaaaggaggagtgatgcatcacgtgatacaatctccgatttgatcccgttaaatggaatgctggagtgctatagacgagctggggtgattcaaggaggtggctcgtttatgttgacggtcaattgcttagtaaggtaccgtttccgtttggtaatttgcttttttatttcgttttcgggtggaatctgtactttgttccacagttaagtaccacataattgcacattctgaggttctacataaggacaaaatggaacattgggcatattcagaaattcgtttctttcagttgcacattctatgtaattcatctgactataaatccacataatcatctatttcttcgccgttggccccactatttctccgaacttccttgaggctcttcctcttcattcccccacactaattattccatagttaatttttcgcagcgagtctctaacgcatgaggaggaaaatatatggctgaaaaattgaaaaatctcagtattggtatttcctattgactaatttttctagaattcttatgagagtagtctcgttagtatccttgcgaagttattcaagcggacttcggaaatccctaaaaggctcttccagacttgggaagagaccttctgcttcgtcttcatctagcgaaatctccaagtctgttcatcctacaactccagccagaacaagattcgctccttctccaacgggatatctacaccttgggtcgttgagaacagcgttatacaactaccttcttgcgaagaatacaggaggccagttcatcttacgtcttgaagatacagatagaacgcgattggttcctgatgctgaacagaatatctacgacagtctcaagtggtgcaacttgactatagatgagggcccaaatgaaggtggtccctatgggccctataggcaatctgaaagaatggaaatttacaaaaaatatgcccaaatactcgtagacctgggccatgcatatcgatgtgtctgttctaaagacaggctccttcacttgcgagaaacggctacaaagctaaagcctccaaccacagttacatacgacagaaagtgtttgcacgaacaagagggacaactcattgacagtaacgactatgtgatacggttcaaatcaccagatacttatgagccatttaaagatttggtccatggcaaccttaatcttcaaccacaatataactacagcgataggcgatacgacgatttcgtaatagtaaaatccgacggaatgcccacataccattttgcaaacgtagttgatgatcatttgatgaaaatcacccatgtcattagaggcgaggagtggcttccttccacacctaagcacattgccttgtacaatgcatttggatggactccaccaaagttcactcacattccgctcttgacttcgcttgaagacaagaagttgtccaagagatcaggagacattggaatactttctcttaaagagaagggaatccttcctgaggcattggtcaactttgtagctctctttggttggtctccagttcgcgacgcccctggcgtaagtgcgaatgagtccatgtccttagaagaaatcgaggagaagttttctctagatcatttgactagaggaaatgctaaagttaatgactcaaagttattcttctttaataaacatcacctccacaaagctctcagggacccaacgaagattgatcagtatgtcaaggaaatattcccacgtttatctcagttaagtcatggaaaatatagtgaagctgatgtcaagaagttgatacaaaatctcggttcaagtttgacttcaattaatgaaattgaaaccgaccatgcttatctctttcaacccaacgactactctacatttcaaaagattggagatcctagtaaggctgcattaattgtacaggcacttcttgacgagccggcaggttcgtttaagctgaatgtagatgtcatactacaaaagcatcctgaacttgcaaagaaggatatcttccaaacagtgagacttgctttgtcaggaggaaagcctggattgaatgttccaacgttgatcgatacccttggcgaggatgcctataaagaaagacttaactcttttcttgtatatataaataactagatcatgtatatatagatttctgcgctaatgaatttgctttgaagtccatgaaatcaggttccttatttcctctatctgttccgtcgaccaaaggaccagaataaatgcaatgaactgccatttcaggatgataatagagacctgtcaaaagcttgggagtgaccaagaaatactgtgaactcaaactatggcaggccgtgtccaccaagtacctgtgagccatcttttcattctttcgatccatcccttgattgatttcatccacaactctaaatggagaatttgttaatcccagcaaagacatcatgaaaaagatagttgttactgctctttcccctccagattgtgattggtggtccaaaacctttagctctgactcttgtctaaatttaactagaatttgcaatttccaatctttgaatctttctgctttggctaattctacttgtccatcgcttgcgactctggagaatcgcttgttaaatgctaatgaaatattccgaattgccttagttagctctggttcccatgcttcttgaatatcactaattcttttgtccaatttagacttgtcgtccttcaaccttggaagagtcttctcgagtgaatcaatttcagtcaaggtcctccgtaatctttcgatggaactcacatcagcagtagccatcacagaccgctcgtcttctaaaagcagtattttgtctcttatcacctgttctgagaagttaccagcatccatatatgccttggcaagcctagacaatagtactctttcttccggagtgtacgaagcactctgttcttcgatctttttaacagcatcccccttcttaatttggtcatattctgctttcaatctttcatactcctttcttaatgaaacttgttgttcttctactttagcaattagattccgggccgcgatctctctgtttctgatttgaagcactctaaatgattgcaaacttagctcaatagcaacatcgctagattccttaccaatgatactaagctccgataacttgtttgaataatccaaatactttgatttgatcttctcttcggtttcgtcaacttgttcacttgtgtcttctgtagattcctttgttgtctttttgatttgcgcgtcaagagccgttaactttccttctatttttgccctgtttttcgtttcattggtgaaatgctgaattttatttttatatttctcaagctcagccgaaagtttacgactttctgaatcgagactttgcttctcaacaagatatccatcttcttcgccttttaaaacgttgtacctgtccttaaattcctgtaactgaccattcatgaaatctttagcttcttgagtcaatcctgatgaatcgaaccatctagatccagtaaccttttccgtagtataagaaacttgattcagaccatagttcgatttagtcaacacaaatagagtatcatgagaaataaacttcttgaaagggtatctcccgtttccatctagcattgtcaatcgttcgatctgctcttctgataatccacttctactcacgggaatatcctgaatctttgatatatcatatatcatatctaccactggccctggacccgaaagaaaatctgacaagtagcattcgaacccccattgctttaatctttctttgggaatacgtggatttcgtgtacccaggttggttgttaatctaattgggaaatttatcttcatcttcctttgaaaagaagagatcatgctgaaatcttgtttgttagtggtggtaattgaaaagagcgtattgttgtcaatcaccttttccaagtgtggggccattgttttgtttgttacagtacaacaaaccacaggcgactcaaaataatggtcctttaactgagcttcatctctgagaaacttgtgtgcattatatgccccatccctcaaagagtttggcggcccccctcttggagaaaggaccattagtctatctttactgtttaaactctgctctactcgcttcttattgttcatgatttcttttcgtgacgattgcttttcttgaattttgtcctccaagtcttcaatcttgcttcctatttcatccttcttttcagacacttcccttcgcaattttctgtaaccttcaacctcatctttgtcaggtaatactatcaagtcacgttgtgaaatcaattcgtgccttttttcttcaagtttctttaattgattctgcaatttgatcgatttactcttcaaagactcaaccgttgacttcaagcctccgatttcctccttaattttcgataaatctgcctttctattgataaacctagaccgtatttccttttgcttgtcatctatatcggaatatagtcctttttccatttcaactttggtttctatttctttatgctggtctttcaaagggtccatggaagataaaaacttcgacaatttagattttgctttgtctctctctcgttttaaatctgctctctgttttttgagatcagatagttgggcgtacggaattatctttgtgtgttgctctatctctagagtctttccttcatactcttcaagcttctttatatctgcttctagtctacttctttcttcgttgaatttcagtaacttttcttcaagttcttctattcttgtagtcacatcttgtctcagagtatcgttcttgatcaaatcctcatgaagacggtacaactggccatcacctaaagttctttctgtttccataagtagcttctcttgtgacatcccagcaaattcagctaccctctcttgcggcaaaaagtgacataaattgtccaactggatgttaaacctagctcttaactctttaactttggcttctgtggccggcctgtggtttatataccaacggttttcttttgccgtgaactctcttttaactaaaataggaggttgaccatcaaaattcttgattgtaacttcagttgaagctgtggactttcctttcttaatcatggaagaaagagtctgtcttttaataagatcaatctttccacccaaccccaaacagatcgcagaaactacagtacttttaccagatccattaggaccaataaccatgttgagtgaaggagacaaattgaactctccactaccgtagttgttgaaattggtcaacttcaacttcataagacttccaggacggaaatcacgagaactctgtactttcctacgcttagccacagattcagaatcattgggaccaacatattgtctcaaatcgcctatggcttggtatatgtccgtcattgtagacgtgtgccgataatggaatatctggtcacttaatactgacttttgctagtgctctaagctgtcctgacttttgatacagaaattctattttgatctaaagcgcgtttaaggagaattattaagtactgcggcacggatctttaaactcttgttaacatatagagaatgtgtttcacttgaagtacgactacgtccataaattgtaatccgcagatatataggcttacaaaagtaagtcaggctaagaaatagaagtgtattgtattctcataaaggatcgaattcaaaattcgatttcgccaacgttataaatcacatgatattttacacgtgatatatgtttacgtatccaggcaccggtagaagaaaaataaacaacttccagtattcaattgatccatacaaatcattaaccatatatactcaaggatattctgcatcaaacgcgtaaaaatggtacgtatcaaatatgtataagttggaagtggtctgaacacaatttctggtttctgttgttcgtttttgatttttcaaccagttttcagatcctaaatatccactccacatacacccattactaacatcttaagtcccaaaacaccaaaacttacaaagacgcttttgccctttttgacaagaaaggaacaggtaagattccagttgaacatttgggtgatttgttaagagcagttggccaaaaccctacattggcagagatctctgagttgcaaaactctgttgaatctacagaatttgactttgacacataccagaagatcataaacagacccgatggattcaagcctttgggattgcctgaggactatataaagggttttcaggtcttcgacaaagaacagactggctacattggcgttggtgaattgagatacatattgacttcgattggggaaaagctttccgactcggaagtggatgagctcttaaagggtgtcaatgtcacttctgacggtaacgtcgactatgtagagttcgtcaagtccattttggaccagtagagtatgagtttgtttagaggataaatggtgtcactatttatttatttcgtatatgtttttgtgttccttgttgttgtttcttttcaattcaacaactgccactggttacttctatcggataaatatacaatggtaattattgcatatcgtgaagcttcgctgaagttttatcttccttggttaactatgtgaagagcaaaccgtgtgtagtttgtgcaggaatatttttcacttaacttgactcttcactagatgctcaactctagtaacaagctactgttggtccgtattcaaaatggccgatatcagcattgatgccgagtcgatagaaacacaagacttgcgcagaaatgaaaggtttcatatgtatcccagtgaaaggttggaggcattcacattgactgctggtatcattggagggtttgctgggttcttcgatggggtcaagcgggcttccttaagatatcttacagaaaacagtcatagaatgcccaagacagtaggaggctggtacttctatcacaagaagaagaattacgtaatgatcatagacggctgtgctactgggttcaagcagggttgtaagtattctgctgcggtaggagggttcttcggtatggaatgggtgatagacacttatgtaagatcgcaaatagacttcttcaacaccgtggcagctgctactgtctattcggctctctatgggatgtaccagagcttaagtgcggttcagactagaaagtatatcctaaagggatctgcgttgggcttgggtttgggtttggctcaagattcgcttcgttatgttagaggagcagacgtctggtatttgaagaaatttggaatcagaaatccaaatggaccccaagccttggcataaaactaaataaagttctgttatcaatctcacttgtatatagagataatgggaagggaattgatatttaattgttaatatagtggtagtatatacaaatgacaaatacttcatagactatacattacatcaacgttatggctcattaaagaaatcgttctattaactatgaagtgtttctgatttacttgtctactcttcgtcactttcgtccaagtcagggactggatacttcaagagagccgctatcccagtcaactggttgagttggattcctgactcgtgcaagctggagaatataaatacctttgcaccaagatttttggctctttccgtcaagtcaatgtagtttcttctggtgtcaatgtcgtcacttctgaaaagctggtcggtgaccatcaaatacctgacggcatccaagtcgagagccttagtcacttcctcaagaccgtaccatgctcttccatcatcatcattaagagcaatctggaatttatgcaacacttctgattcctcggagaatttggtgtcgcttaaccgcttcttagtagcaggatctttcaacacttcttccaatccttgcaagtatccagtcgacgaatgggttatcacgaacttgctcttgttctttaggatgtcattgtagatcttcgagtccttgttggaactttgggaattctgagcagccgtacattcctgcattattttgtcatataatgacttggctacgaatccaggagatgccaataaaatcactttcaaggcattgaagtcaaagtgtcttaacatcgtctctaccaccattgtgagaaatgtgttcatggccttgtccaagtccttggtgccatactcgctgtttttacgaggaatcgacttctctaccttagccttcatcacagtcatgctgtctgtcacatagcagatgtgggccacaccttcttcaagaattacagccccgatatcagccttcttttcgattgagcataagtcattcaaaatcgacatgtcgtactcgtcccaattgtctttgagaatagtcaaatccttcagtagttcgacttcagcagtatggtaactgttcaaaggaacatattcgttgggctctatggattttccactgagtcgcatgttgttatccgaggcgatgtagtcgatgtcttcaagcaccaacttcaacttgacgagtactttttccatcttgctcttgcccttttgcacctgagtcagatttcctttcttgacatttctataggatacaactactacggtgtctccaggcttgaggagattgtagagataccagagatcctctgcatcttgcggcacaaatgtcactgccacattcttgtccttgagtttgacttggttcttcacaagcatttgttctagtgaagttaaataagaaaagaagaatggcgttgtcatcgcatatggtcttgttcccataggttccatataatgaaaaatttatatacagtgcccgataaagcataccatttggtactattgaatgataaatattgttcatatacagaatcaagaatcttaaaatttgatatacttaagagtaatacttggacatgatgttatagaaagagtctctctagtacaaatagacaatctcgcaatagtaactcattatttacgtatagaactctgcgcgaaattccttacattctacatcaaatctgtatctatataccatttctctctacattacctctattcgtttcgtttatttatgctcgaaggttctactttacctctgccttgacgatggatgtgttgtggcaaagttcgcctctttcattgaccaatctctttggctccttaccttcttcagtgtaggtgacttcgaagttctcagttgtggagaagcctggttggacagcttcccagatcttcttcttggggttcaattgcttttctgggacaccattgaagccttcaaagaatatcttttcaccggccttggagccagcaggtggattgacgaactcaaccttgccttcagttgaggcacacaataccattgcacaagacttgacacctctcatggtgactggcttcaagttggcaacgacgacaacgtatctctgttgcaagtcctcgataggcatgtaattgaccaaaccggaacacacgattcttggaccctcttcatcgcccatgtcgatagtagacatatacaacgaatcagcgttagggtgtctttcagccttttgaatgaaacctactctgaagtcaatcatagaggggtttggtggcacaacagcagcagcctgtttggcgttttgttcagccttagccttggccttagcagccttcttggctttagcagcttcagctctagccgccttttcttcttcggaaattgggcccttaccagcgctagcattagcagcttcttgagcaggagcagcagcagaagtagcagcttccttcttcttgtccttcttttcgccagtttcagctccggcggcagcagctggcttcttcttttccttgacttctctgggaagttcaacgtcgttgttcaccttcaacttgtcaccttctgggacttcaaccaatgtgttctggatcaaatcgacccatctgatgatatgtctgtattttgccaaatcttcaacagcagtccacttggaagcaactggcaaaaccttttcaaaaacaaccaagtcggcctttgaagcaacgtttccagcaacaaatgtcttggttctcaagttggagttcaatgattccaacgattctggctcatcgagtctggcgctcaaggtctggaattgagaagacaaagccttttgttcgttagtcaaatcggcgaaatgcgagtcatccgccttggaaatatcggcgaacgataacttggaaaaattggtaatgaaatcagccatttttggttactaaggtgaagatcaaagagttagaactattcataaatgctactagaataggtgaaaattagtgaacttttttagtacggtcacgtgtgaacttgcggctgacgaaaccagtgcaaatcttcggatgacatattttgcaactcaatctacagtagattagctaaataagcaagctagagtggtcgtttatacaatttatatgtattatcaaccttcggaagttaaatatgaagcaattttcagctttgctacttttataaagaactttcgattttttctggaaaaaatctcatacatatttgcttttatttttctcaaaattcttccaattctattagaaaaatacaagcattcaaaattaaagctcgtcctcttcagatgaaatcagaattcaatcccacgaccttctttaaccaaagccataacacaagcccatccacttattctcaagcaaccaataatgttgcacagttataagattgattggattgcgctaccaaataatatcacgtgactttgtctaactccagaaaacagtgaaactaattccgggatcgtccttaatactccagattctagccgagtttcaagtacggcggaagtcccaaccatagactctggatctgctctcaacaaagcaacaaatggccgttgaccatgagtagcgatgaatcagaacgaaccgtcctggtgaaacaggaggacgactccctcagaccggtaagcatcacaatacacaatacacatactagttccgtactccgcaacagcattgaaaactaagaaccgttgatactaactcttgtagaaaaggaaaaaaacaaacagagcatgcaaccattgtcataaggctcatatgacatgtgactcaggaagaccatgtaaacgatgcatacaaagaggactcgacaagacatgcgaagatgcccgtagaaaacggaagaagtatttggccgatgtgcccaacacggcactattgcccaatcggctacagcaggcggaaacatacgatggaacgaacgcatctccaacagaatctggtagatccatcatgtatcaggctactacgtttcagcacagttctacagtaccgataagttataccaacagcattaatgatgacatttattctttgggattctcgaagagccataatagttttcttcccaggaaccagaatcagacacaacctcttgcacgttcacaactgacattttcacaaaaacaactgacacttccacaaacgcattcaaatctttcactgagtcttcaactgaatcttcaacaaccggatcaacaacagcagcttcctcaaagcactgactatatgcgaaatctggtaagtcgttctaccaatggaggcagaaggaccaatttcttatcttcggcagctgatctcgagtactcgacattatcgagcattctccaggacaactttatgcatggaaaccattcaacatccaacgaaggaacgcctaattcaatcacattatcaccggctctatctccgcatgcattgacgactaccgtatcgtcaaatacaaacaccggcactgcaaccagaaatatgacaactcctgacgacttaaattatactagtaaacgtaacaaaccgtatgtagctggatcttcgcagactccatcaccacaagaccagctcagcaatggttctatggaggctaaggctagaatatcgaacgccagtgccagcatatatgaccaccaacggtatcccaaatgtgacgagtctatcaatcagtactttcttgggcccacagagtccgatcaggtactgatgtttcctgacgtaatcactgctatagagacaatgaaggctagtgatccatctgttttctacgagcggaactcgaagctggcgctttcatttacaatcgggattgtacctgacgataatcactacacaaagaaccacgactctgtagagaacgagtctttctataaggagcccgaggaaatttatgccaaggtgaagaaaccattctcctacactccaggctaccactcgttaattgcatatttgagaaagagatttaacaagcccatgttggtgaagatggccgagtcgatggccgcttatagaccttccttcattgcctgtaccaattcattgaaggagggagacttgattttcatggaacagtgtttccagagaacattgttgacctacgacaacttcatccgggttagtggaacccctaccatagtgtggagaagaacgggagagattgcttatgtgggtaatgagttttgcattttgacaggctggtccaaggaagaactccttggtaaacaaagaaagttcattgttgagttgttggatgacaagtctgttctagagtatttccagttgtttctgagaatagcatttggcgatttcttgggagccaccatgaccgagtgcacccttctcacgcccaagactgacgtcaaaatacggacaggctgtatgtggacactcaagagagacgtttttggcattccgatgatgattgtagggaacttccttccaatattgtaggatttccctgtgtattacatatgtactatttagtctaatatcaagaagactttgtaagaaagtacaattatgcaagctttgatttattttcaaatagtctgtgttgataggatacataggactctactatttatccaaggttaatagcttgaaggtccattttgcaatcgtatctccagaaatgctaggtgcaggagatatatgataacgcataagatctagagaacccctgaagtgtcctgatgcctattcccagctgatattctttgctacaaggaattgttcgttgacacaattgatcgagtattggtttcataataggcgtgcattgtctcatacgtagtaagatctttttaaatttaattacgaaaattggaatcgattattatagattgctcctcagacatagtttgtttgaatacggatcaagatcttaactcaagtattccatatttatcacaacttataaagtcaactataagcaattctttgaaaaatgaccaatagtctttcggatcccaaattgacggccacacttctaacgactgtgtcagtgatctgtcttggttcgcttcagtttggttaccatatggctgagttgaatgcaccggaattactattgtcatgtaagatatctgttccagggctggtaccatttgaaagtctgtggtttggatcgcatgggtttgaacgttgtatcgaactttcgccgcagcaggttggcttggtgacatcgatcttcagtattggaggattgattggttctttctatgttggaaccatagctgatgccattggtagaaagaagacgagcttgctccattgtgtattcttcttcgtgggctctaccttgaacgggttgagcaattcctatgtttcattgttgttcggacgttttgtcagtggtttgggtgctggctctgctattgttatcacttcgttacttatcaacgaaattgcccctccaacttctaaagggttgttgggctcgatgaatcaagtcagtataaacgtaggaatattattcacccaattgttgtctttggcctggtgcacagataacgactggcgtcttctactcttcatggcttcgttgcttgccattgtaaacttcttgcttatcttcttctacgtggaagagtctcctgtttggttgctcaatacgggagataatgtcaaagcattcactgtgttgcatagattgagaggtggaagctattctgcgtctcagtcagaagtcaacagctggaagaaacacggtgctggtaccggtgatgaaggcgttatcttgctagacaacggtgggtcacttgaagaaggcgaaggacaagtgaatgcttctgcatcctcaactgtaactttgaaggaatacttgagttcgcgcgagtataacaattcaaaactcgtagctactggtatcttgattctccagcaattggacggagtcaactccatcatcttctacggagtttcggtacttgtagcgatcttccctgaccatgctatttccatcaattgtttgatttcgactgtcaacgttgtagtaacattcttgtctgccaccgttgtggatagattgggacgtaaacctcttttacttacctcagtgacattcttgggaatcctgtctgctgtgatgggattgggtattatcaacacaagttcggttttgtccatcgttggaacgttcacatacataaccttctttgcaatagggttggggcctattccattcttgttggttggagaagtaactcaaccaagggccaaggctctggctcaaagttggggtactaccatgaactggttcgctacctttgtagtaggttacgcatttcccatggtgaagaacgcgattggtgggtatgtttatttcttcttcaccgctatgtgtgcagtgagttactggtttatccaagcccatattcctgagacaaagggtcatgattcctacgaagaagtctggggcatagctaactagtgtacgtacctaaatatttgctaacaactagatctattagctatataacgctaaaaaaatataggcacatatttgacttctatgaattcatcattttcagatgtaaattctattgaaagttgtcttcattgaagaactacgctctattggaaacactaatgggtgcaaaatactaaccatttttaaacaccacaagaaacacggccgcaattttgtccttatcacatgatataatctagggctcagccctatagtgtaaatatagtgtagaaatggggtctgtgtacagtccagtatttcagctccaacttgtgcgcaactcaattgccaacctaaccgttcagttcagtcgcacaattcagtacaatactagcaaaatttcctgtacactatagacacacgtgacatcaaattttcattctctttcatcctcgcacagcaacagcgagaaaaaatttatccagctacttttatggaaattgccttatagtggttctctttcttttttagaagctagtcctttaatctatcagtaaagatgcctaccagattaactaaaactagaaagcacagaggtcacgtctcaggtatgtaacgaataagagaagaattagaaatcaaaacgaagacagtgtagtagaatccagaaatctgagtttcaatcgagtgaaaaagcgtccaacaagacactctcaattatgaagtctatgtttagtacaaaacattatttgaatattctgataggaacgttccagcattattgccatatcaatctcattgtaatagcccgtgaatcagatatttccagcccatttctatcatgaaaaattatatattgtgcaactttagaagtgaaaaatttgtattcatcacatcgatagggtatactcacaaccacaacaattcaattcagcagatctgactataagtctgaatgtatccaaagcaatgtatcaatgaggaattttcagatggagtagctacagtcatcttcgaagccaatatgaattcgtatactaacatcattatagccggtaagggtagaatcggtaagcacagaaagcatccaggtggtcgtggtaaggctggtggtcaacaccaccacagaaccaacttggataagtaccatccaggttacttcggtaaggtcggtatgagatacttccacaagcaacaaaaccacttctggagaccagaactcaacttggacaagttgtggactttggttgacgaagacaagaaggaagaatacttgaagtctgcttctgcctccgctgctccagtcatcgacactttagctgccggttacggtaaggttttgggtaagggtagattgccagaagtcccaatcattgtcaaggccagatttgtctccaagttagctgaagaaaagatcagagctgtcggtggtgttgttgaattagtcgcttaatttttcaaactagggtttatcttgtactttctataaattttacatactctttcagagaaaaataaataatttacgtccgaatacagtaggagggtagttactgaagtctgtttaatagctagtaatgaaattgtccatgtcaattgtcgatatcaatagtgtgaatttggagcaagtgaaaatcgtccgtccacataaataagcactacatagttgagagaagagtggatgcgccaaatacatagaaaagagaaaaagagtcaagaaattgaaaatgaagaaatgtagccattctcatggccaccgaaaatattccatatataccacttccttcaaggcatacagctcgtagatactcggtagctctgttctcttgtgccaacattgaactcactaacatttccacagctagcactatatgcaacctcatctcatcgaggtgttgaaaatgtctctcctgcacacacccagtgtttacattaacctgtctgggtgaagactccaccttcaacgatttaccaggatcaagaattttctttaacagatgttggtagcttctggccgtgttcttaccaagcagcgttttctaggagtgcaactttcttatagaataaagcttccatcgtcgaatacttgtagatatagcatcagaaccaatttgaacttcaaagtcaatttcaccaacatgagtcaaatcaaaacggaaactgccaaagctaatggcaaacacaccacttgggcggatactacagaaaacatctggaagcctgacactgccgttccagaacatatccgtaagctcttggtaccttcaggtccgaaccacagcgttaactatattcttgcttttgttcagatagtcagactcttgaaaacccagaagagaactggttgggttgaccgtggaattccggcagaaaaagtcgaaagcatcagtgaccacatgtatcggatgtctatcatctcgatgttcataccgaacgagaacattgacatcagtaagtgtgtgaaaatcgccttggtgcacgacattgctgaatcgttggtaggtgatatcactccatttggaggagtcaccaaggctgaaaagcaccgtcgtgaattggaatcgattcagtacttgtctgagatcatcaagccatacaatgaaaggttctccaaagaaatcttggagttgtggttggactacgaagaaatcaggaccatcgaagccaggtacgttaaggacatagacaagtacgagatgatccaacaggcttgggactatgaacaggacttcggcctcacatatgatttgagtgagttctatgattcaagaaccgccatagtctcgaaggaaatcggcgagttatgtgacgaggtcatcagacagagaaacgaacacatcgaggcattgaaatcgaaagcttccagctagacgacatacactgcaatgatgtttagacagcacaaaattaccacaagtagtccaagatagctcagttaggatacccggagtgtggtatcactctgagccacggaggtctttggctattttcgttagcatatgcattttagttcttcatcaattgatacccattagagaaaggccctgatatattgtagacaaagtgtgaagtaaaccaacagtagtataggcgacaaactatacagccaaagataaccttgtattaaaagaatgaagttgcattgagttcgtgtagtttaattgaatgatttcaatcttcatagtgaaacaagaaagcacaatgataatggttattctgaattatttgtaactggtaccatacccactaaataatccgtacaacaatggcacaagacagttattctaaatatgaagaaacaactaaatagaaatatattcatgtagattgcacagtatgctgaaatgtggacaaaacgggtgcaaaataattgaaatttcatcaaattgtccccaaaatttttgagaaggcctctcaaattcaccacaactttcacctgacactcccaacctatatcaagctttctcagcttgaagtctgattcaacattaacttgtacatcctccatctcttctcccataactccattgccttctcctatatgcacactgctgaataatatatattgccatttcacaactctagcattatgtacttcctcttcttttgagattttctctaaggacaaatgccggaacccatcgagtccaaagaagcggtaaccccatccaatacgtccaaaccggaggtaggcttgacgggacgcaaaatcatctatgacaaagatggaaaaccgtatgtaccataaactaaagttgtcatatcacaaatatattctaacagaaagcatagatgtcgaagctgtaacagcttgctagatttccaatttgctaccgggggcattaaaggaagtgttattccgaagaatccgaaacattccgctgaaaacaagcctaagctcaccgaaactgtaccgaacttcgttgattcgacggcaagagttggtgctactaagaaggagaagtataacccttatccaaaagatattccagcagatgtagaagtattaggaaagtcgtcgtggacattactacattccatagctgccaaatacccagagaaacccgacaccaagcgtcagcaggatctcaagcagttcctcacgttatttggaagcttctatccttgctggttttgcggtgaagactttgaaaaatacataaagaaacacgagcccaaagttgaaactcaggactcatttggaaaatggctttgcgaagcccataacgaggtcaacgtcaagttgggcaagcccaaattcgactgtaacttgtggaaaaagagatggaaggatggctgggaagaggatccatgaagtcaaagaaatgtacatagaaatagtataaaaaacctgtaaatactagaaaacgaatagatatgagcaatggagacgagattacaacgaaatgggagaacaagtgtggaaataaagaatgactcagatagtaggaatagttatagactttgtctatacgaaatggagtgcgacatttcgaatatagaaacggcctgaattgtggagaaatggtatacttttctttattggccatacgatttcaagatagcaaaattgtatcattgtttgtaatttttggattaataattctatattagactaataattagcaagagttgctgtcaataattgcaaacaattaagttcgataaaaatattctggtttgatacttgaattctttgttttgagattgtttgttagagagcaatttatttgccattttcaaacagaattggttgctcagaactcttattagtgaatagaatatgtcaatacaattaaacagcgccagacaactaaccttccgtcggacttttttcagcggatggtttaaagcttggagaacccagaagctcatttatcctccagcagcttctgagtttaccaccaagaacaggattattcccaactacataacatccagtaatgaattgtacgatttgattttgttcaaggagccagtcttattgaatttcacctatgctgagccaaaatcaaataaggtgacccaggcactttttgatgtattgagtgatggaaagaagtatcccaagccagaaaacgaacctgtgtatttggtcaatatcttggccgatagcgaaggaggacgtgaattaatgttgcagtacgtagtaggaggtcatattcccgctgtagtggtgttgaagaagcaacagccggtagatacatttgttcccaatttagaaaacttcagcgaacaggacttagtagagtggataaagacgatcgagtaggatctattgatagctccgtagtactaacgagatttaatatattggaagcgttaatgtagtggaatttgtaggaaaaattcttccgatagggccagactacacgctagagaaggaaacacagacatttacgaagagtacgaaacgaaattgcactgctaccaagttgcaagatgggcaaggtataaaactagagaatggatgggcattggatcattttgaggtttatacggcgcaaacaaatggcgaaccagagggagaaggagtactggcaacctactgtctgtgaaacgagcaaaagagtgaagattgtcacaagagataatcggctctacctggaacgatatactatgagacgaactgttttctttgactgtgagtgggcagtttcatatattggctaaaggtggaatctagttgaaaaagatgcaaaataattgcaactgtcccaattatgcatgtgagtcgagcgcaaatctacctagaagctctaatttcacaagacgtagctgaaactgatcgtagaaggcaagtgcgagtacgggaatggtggcagtttcagtgagggaaggcgttgatgttggactagaggacatttaatatgaacatgtagaatcagactagagtagaattggaatcataaccacagatggacatttgcaacctcttatctcagatctttttcgaaatggcaagcaagccaagtccggaaatccgactaccgagaagcagcacggaaaagaaaggaaaatgcagacatatgtcgtacttagggacgactttgcatttgtcatttcacgcaccagacgcaccagaaaatgtcgcactgtggaaaccggaaatcaccatactattagtaatttttagtagtgtcaccaaattttcaacttgtgcttaataagacgaaaaccactggtttctttcaaagttagaagcgctcggaaattaacgtaaaccagactgctgcttacgtgaagtcattacgatttatcagcacctgcgtttgtacctgtctgctatcaatatcttatataactccgattctgtccgttattcgtcgctaccatttttcgccccactcatttccagactccacggttgaaaaattgagtttgctaaagatttgagcatttaccttcagcataacctgctttcattgcacatccaagatcgcaaagcattcctagagcagcctacagtggcctacaaagtgtaacttttttttgttcataatcgaaatctctcaaatttgtatccatagcaaatttgaatatcttgtaataaccatagcacattcacaatgtcacccagcactcccaccagatccacttacataaagcagcctatacctgcgaactcccggatcccggacatgaaccatattccgttggtctcgcctgcggtaacgccatcggcttctctttctgatactcctgttcctccaccacaggtttcggaggaaatcagacatcagttagatcttccagataccttgcccgtagtcaactgtttggccagagcccgtattcccacgactcagggtccagagatcttcttgcatttgtacgaaaacaacattgacaacaaggagcatttggctattgtctttggtgaagacgtcagatccaagactctattcaagcagagaaggggagatacgcagcaggatagaatgacaagaggtgcttatattggaaagcttttcccaggtcgtacggtggctgatagagacgacaagaatggtacggagttgcatttcgacgctttgggcaacttgatccgtgaaagcgaaaccacatatgccgatcctgtcttggtaagaatacattctgagtgctacacaggagaaacagcctggtctgcccggtgtgactgtggagagcagtttgatgaggcaggcagaatcatgggcaccaacggccatggatgcatggtgtatttgagacaagaaggtaggggcattggtttgggcgagaaattgaaggcctacaacttgcaggacttgggtgcagacacagttcaagccaacttgattttgagacatccagcggacggcagaaacttctcgttggctaccgccattttgttggacttaggtttgactgagatccagttgttgaccaacaaccctgacaagattcttgctgttgaaggaaagaacagagaagtcaaggtattggaaagagtgcctatggttccattagcttggaagaacaaggagaacggaatcaagtccaaggagatcgaggggtacctcagtaccaagatcgagcgaatgggacatttgttggagaaaccaatcaaaattaattaagatacgatacgatattacatggcactagaatatttaatggcacaaaggacggaaaagtgttgtagaatagacgtagagtagatagagaaactcgtagttagagtgttgacaatacatgctttatataaagcctaatttctttcttcattcttcttgctttcatggatagcaactgagtcttcacatccagtataactttgtgagtcagtattatcacatgatgcgtctagcctgtgcattgacatctcgcataagttccccagcaatgaatatccgtcagaatcgaaacgacgaagggacgcagcgtcgacaaggtgtaggaacggataagtgaaggagatctgcgttcacgtaatgcccacagtagagccactactaccctctaaatgtctactcgctcctaaccaaccagctctactggcccatactggagaatcataggacatacctttttttagggtgaaaaataatctaactttgatagcgccgtaaattagaagttaaaacggtaagagttgtccaggtcgtgtctgcacgactcccgcattttgcgcattggctacatgccgaactccccatagtgaataagattcattattatttccgtcactggtttcaccactgttatttactgaacatacttctttctctggttaggacctccaattccttttctgtcgtgtctgtcccgtgtctgtccgctgctgtacaccgttagttttgctctagaagcagccgtctttttcgtggtagttcactcgtggaaattgtcacattcgtaatttttgacatatttcacagatttgtcacagatttctcacgtagtctttcaaaacagattctacgctgacgccagcgacctgaaagcagtgccattcgagtcaatttcattgtgccactgcgcaactgccaacctataattacagccaagttggtgttctgaatcagtatctcatcgcatcataatcagagacttaagttcagaataagaaatacaagcttaaagcctcttactttcccacagccattctcttctattttcaaagcgttcgagtttttccgtcatgatcaaaagagagggcgaaccgttccccgactactcgcacccgtcagaagagtccgacaacgagttccagctgtcgggccttctccattccacctccatcgctgcgtccaactcctccaacacatcgaacaacaacaacggaaacagcaaccgaggagaccagaaacgtagacgagtcaccagagcatgcgacaattgccgtcagaaaaaggtcaaatgtgatggtaaacagccttgtatccattgcactgtttattcgtacaaatgcacttatgatcaacccaacgtcagaaacaagaagcatagcggaatacccattccgaccgcgctgccatcttccgcagttttagccgccgccgctgccaacattgccaattctaacggaagcaacgttggcgacctttctcagactttgtcggcaacatctgcatatccagagagaaacctattgctcgcccaaggcatcatcaagttgttgcttcccaagttgaagatcaactgcttcgaccacaacttgcagtttgacttggaaaagttgcagaaagttgtcaaccacatcgacggaaagtcgtcttccgccttgaacgatatcagtgacgtctacttggacaacgctcccttaccatctcccagtaatccaggatctattcgtcacgaacggcaatcatccgtgtcttcctctgacgaaacgactatgggaacagaaatcaaattatatttgcccaagaaagaaatcgccttggacctcatctacaccacatggaacaaggcttgtgttttgttcagattctaccatcgtccatcgcttctagaagaagtagaccttctttactctttggacccgtacaattacggcgacagacagcaaaaattcttgcccttcttgtactcgattttggcctgtggatctcttttctccaagtcagcgacaacatcttctgatcgtaacgagaacttggaagatgatgggttcaaatatttcttggaagcccgtaagttgatcgatatcagcaatgtaggcgatattaactccatccaaaccattgtcatgatgataatgtatttgcaatgctcagccagattatccacctgttattcgtatattggtattgccttgagaagtgctctcaaagaagggttgcatcgtaacttgaccatcttccagaactcgcgaaggaaattggacccaattgaagtcgataccagaaagagactattctacaccatctacaagatggatatctacatcaactccttattgggcttacccagatccatcaatgaagatgaatttgaccaggatttgcctgaagacttggatgacgaaaacgtcactcgtacagagtacttgtacgacaaacaagaaggacgattgtcgtcatctgcatgtgctaaccaacatacgaagctaatgcttatactttcacatatcgtcaagaaattgtatccaatcaaagtgaagaccactgaaaaggaatcggtgaccccagacagaatacattctaaagttactgaattggaattggaattgaagacttggctagatgcattaccaaaagaattgaaacctactgatcccaatgatatcaactcaggtaaagagattccagagaaatttgtattagccaactactaccttcatttggcatttttgaactgccaaatcatgttgtaccgtcccttcatccatttcgtcagcgatggacccaataactttcaaaaatccgatcctcgttcgttgattagaggtagaaactgcatcaaggtagccagaatggtcgtgaagttggccaacaagatgatcgacaagaacttgttggtgggaacatactggttttctatgtacactattttcttctctgttgcatgtttgatttactacttccatttcgcaaactataataatactcaaagtggtggtgccaactatgttggtgttctctttgacgatgatttaaacattgatatgatcaaaaaagacatcgagatcggtaagaaggtgcttgattgtcttaagaacaactccaatgcttcattgcgtattttcaacatcttgaacacattatttgaacaattgaatagaagaacagccaccacttcacgtttgaagaatactagagtggtagacccatatatcattaacaataacttgcagaacgaaaatgttcaatctacattcaagaactttgacatcatgaataactttaagacagggggcgcaaaattgtcagaatcctccaatgtggttaccagcgataagaatccttatgctccgtacactcaacaagatccactgaagaagtccgaggctcttggtctgttgtttaccgatacctcgttggaagcattccactcttctaatgatcctgagttggctgcggttgcccctactgtaccttcacttccaagtagtcttccaactattgaagaacaacctggaatcacgaattcaaatactactgacgaagacagaaacgactatgttcctggtgtatttgacaagttggatgctcaaatctttggcaagatcttacctccttacatgttagagaagaatgcccagaggtcacatgacaagtctgaacaagagcgtattccagcacttgccaaagctgctctttcacaataccaggctcaggttccttccctgttgaatgaccaagcctttggcctggtgaacttagacgattttgatttttctctgttgggggaccctaacaatcttgactacttggacccgtttaataatgaatcgcagttccgttactgagaattacgaaatttaggtttaactatttatttgtaatgtatattagtaccagttaagggataaataagcatctagacctggcccaagttacctacgaagcagtcaccacataggttattaaatgtatattgtagcattacctagcattaatgttccagcttatctttatctgaatcaatatgcagtaccttaaaatttcattccaatatagagaagagcatctcagtttaatttgtaggtagattctacttacccacccaagaacgatgagtgatagaagaagacttttaggttcggtaaatacaattataccgaatgtgggtctttcatcagcagatggaactgcacagcctgcgaagattgagtctaagacagagcctagaatcgatggcttaagaccattctttttgaagacaggaatcattgaaaatgccaatggatcgtcatatctagaagtgggcaataacataatcgaagtgctggtatatggtccacgtccaatcagaggctctttcatcgatagagcctctttctctgtagagtgtaaatttttgccattcatctcccagcccaacgagcatttgtacaacaataccagcattagtgccagctctgctgcaaacaccaccaaccagaccaacgtcaacgtcaacggccgtaccggcttgaccagcattgaacacaagatctcgtcgtatattgagacgtctttgttgccttctatagtgttagaaaagtatcccaagtccaccattgacgtctttgtcactataatttcaacagactcttcactaggagggtcatatctggacacaaagatgctcagtcttgtcaactgggtgttgaacgcttcttcggtggctttggtcgactcgggaatcgaagtaaaggacgttgtaacaagtggagtagctcatttgcagaacgatgttctcgttcttgaccctactgaaattcaagagaaggacgaagggtctgtttcctgtgtagccagtttcatgaacttacgaaacgacgaaatagtagggatttggatagaaggtgaccagacaaacttggagaattcgcaggtggaccatttactcgatggctgtaacgatatgtccaagaaggtaagagccaatatcaattcctatttcaccacttcttaatagatgaagttttcacaaatcacgtttaatttccttctatagttttatatatgcatatataggacttttagtacctcaaaaccatactaattacaatggagtagaatctcaagctgtagtgcaaatgaatgtagaaagaaaatagcacaatgcaagaactagttctggatattggacaattcctccaaaactttcttgatgtggatgatcttgctagagagtgtagctactgtgtttggtgcatcgtgttggaggaacacctttggaccaatcagcacattggtagcttgggaaatgatcttactcaacaacttgtaaacttccaatacgttgtcagattcgctggccgcttctgaaattgaatcgtccacagatcgcgtgttcaacaacttgctgaaaaatttgacttgcaaatctttagctaactcatctgacttcaggtcatccaacggaacagaaacacttggaattctcacttcaaatggttcactgatgtaagcaacatcatgcagaccattcaaatggtatctgaattcatagaccccctcttcccagaataatttgtttccagcaaaagtgaacttaccgctggattccttacagaaagtccaacgacctgaagaagaaagtaaggtcttatttcttgagtaagaagtttggataattctgtataatccaatccaatcacgttcagagtgggtttccttgggtgaagtccattgcacttcgattggagatccaacatcaacgtagtttggcaagtattcactatccttttcggtggtggcttgtaatccacttacatttaacttataatctgagttctcgaatgacaaactctgtgacaattcgatcaacttttgctttgacaacttggtctttgacgtcttcaattccttgataaagttatccaatgagtcagtgatggtgaaagaagagctctttcttcttctaatattctggttgttttccgtgtcattactcaatcttctcagaatcacttctggaatcaagtgcttcttgaatgtcttagttacacccgaatcttgcaaaacttcttgttcaccatacaccttgatcatgtgccacctttcaataaaattgattctcacaaagttgttggcaacccacaagaaacagcagacaagattttcgacagatggaaccataataaacacacccatgacgccacaaacaccaaaaatttgttctgggttgttcaagtaacgatatacaccagccttggtcaagtgttgcatagaactgtaagactttggaataaagaagtctccgtaaaaccagccgaaatagccaatcagatcgatgatggaagagttgatccaagattgggtgaaaataagaagcaaacctacaaatactctcaagtagagccattgactgaacaatagctcagaagtaaatccttgcaaatactggtaaaagtttaaaccaaacaaggaggcatacgtcaagttgatcaatgagttgtaaataacagcccagttgttcaaagatttttccaaaggaatgtcgtttgacaaataccacttcgtgaagaacttggaatggctctgtaaagtcaaaagagtgttgatcgaaaatgattccaataactttattccaacagctaaaaagaaaacaaaatcgaacttgaaggagcctacggaaaatacacggttaccagcagaagaagcgaagattgggagaacaaaagcataagtacccactaatatcaagttcatgacatcggagcctctgaggtagttgaaattgtacaagccaaccaaaggtttcaagttgtcaaagttcttcaaatctctcaacttcaataatttgaaaaggttgatttggtttttggaaggtccgtaaatcttgtcaatgtgaggattttcaatgtaatgcaagaaaatcatttgtaagaagtggccgaaaatggcaattaccaagacggtgtaagatttggcaattaaggcaaagccgtaatagccgatataaccgacagagtacattggatgaggcaccatttcgaatacaccatcaaagatcaactcttcattgttgatttggcggaagaagaagtctccccaataccaagcataatctttaatggtattgtgggcatttactttgacccagaagttaaaaacgataagaccaaaacctacgactaatctagtgttaaccaaccagatcttctggtcatgaaggaattcgttgttgttattgatggcacaagtccagaccacacagatgaaggtgacgaaatccagcataagcaccaaatctacaaactttctgaaaaccaaccaggtgttgaattctattggatagctgtcgatgtcatattcggcacctctttgcgatttgatttcagcaatgatgaatttagataaggctgagttcgacttggcgtcgaaaagacgaagattacgagaccattctaccaatctgttatatttggattggttgtgcaataagtagccaattccgaaattgtacgacaaacgccagaagatgtagaagccgatgaaaatggggatgcggagactgttttccggaacaagccagaagaccaagaggttcagaaacaaacaggccaagatgataaactcaagattcgattttctcactgtaggatcgaaaagagttttcaccatatcgtgggtttcgggaacgacaaaggtgtctcccgaaaaggtgatacctttggggccaaccttagcggagctggctgtctttgttttggtggccatgctgaactctgaagcagacgagttgacttgcgtggtggcgctagacataaagatagatatataaggtaatcagatctaggagtgatgggtgactcactgaaaaaactgtggagtcgatcggaatagaagcactggtacgaaaagttaactattcgaatagaaacttagtttgagtctgaatcacggctggacgatatatacgaaaatatatatagcagcaagcagatgtgtactctgatgtgtaacagttaacgtttaggtcagactgctaccgaagtaagtagattatcacacgagtactggaatgcagtctggggtagaagacgggtgagactcagtggtgaaaatgcggatgcgggaataacctaccttagacaagactgtgaagacacgatcaaatagtagtgagtaggtagtggcaatgctggtctttccaaagtgctagaagagccactagaaagaagaatcaaaattgtctttgaaacagacagtcacgatagctagcacgaaccacaagatacgagtgtagacgggactatggggaaaacaatctgtaacacaatctagactatatctattagacaatagaacaatctagtgcgaaagcgtctggttaagaaatgggagatcagaatcagtcgttgaagacagagatcagatcgaagaagtagagtagattctaacgtgtactagaagatgactccacaaatgcaagagttggtgccggttgataagcagcagcgatatcaagtatttagcagtagcgtataattagctagtgttagcaacaaaaactttcgttatcagaaaagaagaagaaataagaagaaagaattgaaactttcggtatcgtgacattcaaagcctaaacttcgggactcgtccagaatttttcatccaataaaagtaaatagcacacgattactatcactttttgttggctgctaaggctataagcgttaggggcaagaaattcacatgcactttttacacaatcgcctgtgaaaagcgttgggtcgatcacgtgagctagacgattgataggggcagtggcatagaacgggatctgaataaagagagccgaatagagagatccaaatagaaactgagatgtagttcttccttggtaattgttcggcaaggtaagcgtgtagttctctgatttaaaaatactgaaacgaaaaaaatgaatggcagatttttcagtattttggaagaattataagattatttcttcgccttgtaaaatcttctcaaaatcaattttatttggcactttttaccgattttttgttcaatttctagaaattcaatcgagtatacatctttgattcaactactggtcacatttactaatatacccccatcttctagtctttcagtgattcccttctacattatcactacgactgatgtgcacaatctgcaggtaatgcaacctctacatacgtcaaaacttcgaataattacaaatggctgcaacaaataaatataataaaactagataagaaatgcaatggatctagcaatgctaggaaaatactctataaattctaagatacacgaatgaagccctaacagcgactgccttatatggacagctgcttaaaaacgacggttggacaaaggagcctggttggatccagtttggtagtttctttgaccataaccaccacgtccaccgtaaccaccacgtccacggccgtagccaccacgaccaccacgtccaccaccgtatctaatgtgggcaccgaaactctttctgtcgaatctctgtaattctggaggaatggtttgcttagcttctctcatgattttgcacaaatcaccaccaagcttgttgttaccatcggtgaagaaagaaacagcagtaccagtggcaccacctcttccggttctaccgattctgtggacgtaatcttcaatgttacctggcatgtcgaagttgataacgaaattgatacccttgacatctaaatgagttgttagtatagagttcacacgaacaaaattacaatacgatctatctgcttaatttgagatattctcagggagttctacaaagcgctgctggtcattggggtcaaaaatgacatccctagcggcgaggcaaaatacaataaggcaaaatacaatgacaaaattgacaagagagatttcatctattagaatcatactagaaaagcatttatatataacattaattggtctcaagaaacattaatactagaagccttcgcagtcttccggtactagtacatctgaatttcctaggctatccattcaaaagattccttacttcttgcgtatgttggttgaaaccttaaaggctcaaatatgttccaaaccaataatcactctacttcaagaattcttctgaaaataaaatcgtttgcctatcgagattaatattatagatcaatgtgaacatgcttttccaaatatgaaataaattctgctctctttccgtttgttctttgaggaagatggaaaatggccggcattttcctatcacctctatgtttttttgttgttgcattcatcgtcaaatcgtttgttcaacggtatgcaatatgctccatattgttcatttcttttcgtggccccttgcttatgaaaaaaagtctaagtcattaagtctctgcgactctcataaagacaatttgctttccaaactccaagaacacctaaataaatagtcgttagtaatcgtaaaatcattaaaacataccaatacctctggcagcaacatcagtagccaccatgataggggatttaccggtcttgaattctctcaagacccagtctctttcactctgttgcttgtcaccgtggatagccaatgcgggccatccgtcagctctcaagtacgaagtgacttcatcacaagtcttcttggtggaggcgaagatcaacaccttggactccttctcggtggtagcggtttccaagtgctttaccaatctgtcacgcttttcgtattccgaaataacttcaacaacttgggtgatagtatgagaggcagccaattctaaggaaccaattctgacttggatagggtcttgcaagtagtctctagccaagttttgaacttcctttggccaagtggcggaccacatcaaggtttgacggtctggtctgatctggtcgacaatctttctgatttgaggttcgaaacccatatccaacattctgtcggcttcatccaaaaccaaataggttactctcttcaagttggtcttacccatttccaacatatcgatcaatctacctggagtggcaatgacaatttcaacacctctggccaagtctctgatctgttgaccctttggtgcaccaccatagacacaggtgtttctgattctggaagaagatccgaacttggagcattcttgctgaatctgaacagccaattctctggtaggagccaaaaccaacacaacaggaccatcaccagggctcaacaagggctgagcgttgatgtggacaatagcaggcaaacagtacgataaggtcttacccgaaccagtagcagcaatacccaccatgtctctaccagaaagagccatgggccaaccctgacattgaatggcagttggagaagggaaaccctgtgccttgacttcgttcaacacgtattctgggaatccagcctcatcgaaagtagtgatgggatgaggaatgtctgagcccaaacagctcatctggtgttcgtttctgaaggcagcaatgtctttgtcactacgggcagcaacatctgggtgttcagtgtagaagttcttttcgaactttggcaacgattccaagtcccagtctggggtggtgagttcaactctctcgttgtaacggtttccaccgaatccaccgtttccacctctgaaaccacctctttgctgtccaccataaccgcggttgtagttgttgtttccaccgaagtgttgttctctgccacctttgtagtcaccgttgttgtagttgttcatttttgcagacttttgtatagttgtaaagaaaaaaagcttgctaacgctgctacaaaaaaaagagggatactctctgcttatatatgaaaataaaaaaattctgggaaaaattttttaaggaaaaaagcgagatgagatagactgcctggataggaaagaaagtgtaacggttgtgcgtatatgtaagatctctacacctatagactattattgaggtggaaagttgtagtagttagtcgtttatatgtatatctatatgagagaacgagagaacattttccgcaattgggaaagtaatgcactgaattcagaaacggaagtggttagtcttttcaagtggtacttataagtccttcaaagccataatggcactattcccatactagcagcagtggttactcttttcactctacattcttacaagcatttcgtatggtacatttctattatagaatgaatgatcagcagaactgatatgcaaagagacatatataagtacttccaagtagctgtagcacttttggtggtatggtacatagacatctctctatatgaaaagatgtcttagaggtatactgaagttacagctttcaagacataccccggtttaggaatcagcctatggttcggtgttcttgtagccaccggcgctgatcttctcttcgaacttatcaccaatgacagtgcacaactcagccaagttgtccaaaccttgatgcaaggcttccactgcagttatgtttccgtaggtctggattctaatgttcaacttgttttctgaaggatgaggaatggaataaccacagaattcgacctctgggttcttcattatcatgtaacgcaaggcatttcccaaagtatggtcttcttcaaggatctggaaagaagcagcagtaccatcttctgaggctccaggcaacaacttgatcttgttcaagtcatattcttgttcctgctgttcgacctgttcatcggccatatggatatcctcgccaacttcagccattgtttgtttgtgtgtagtggttagttgagttgattacgagattttggtgagtttgatattcaaaaattttgagaactcatcttgatttttcaggcgtgcacaaaccgaaatttgcaacttcatacaattaagatggaatcataaagggaagacgattattaccagccagaggaattaaatcgaaagttatgacagtgaatagaatgaaatacttcagctaatggtgattatacaactcattttgtttttccttcgaaattgtcctctttttatcttactgtattatccctgctctttaggaagagccaacttagactggataaccaagataggatgattaatactgcaaaaatgcctctactaatattccaaagaaggcaaatatagaaagtagtaacatttaaattagagtaattattaagttatcccaagatgactttctgaatggctactatgtccttagtctcatggtagcgcgcaataattcttttcgcgttgtttacaaatgcaatatgaccaacatattgtacttttcaggtctcaccggcttctgttacttcaccaattcacctcttctcatcttttctcattcctaaaacagtcgcctgaaccaaaccaaagaagctggatcttctcttaagtttgcgctcttggatcagatataaatctaagctgaatctaacaatggtagaagacatttctcaaccactttcagaatcatattaccatctttcacaagatagcgagtctgacttcacgaccacggatgaacagcgcgggaatacactacaaggaagcaacgatacgtccaagttgcttcagttggcgaaagtcatcgacaaggatatcgaagatgagattccagatcctgaacaagtgaagaagtttacaaataccaaagagaaaggtccacagaaaagtccacagaataaaagcaacattagatcaaagtcaccttccagaagtcgtggatttgcagtaatcgacaataacgttaagccaaccctgaaagatagagcaggttctaataacatgtcgtcgcttttctcttctcattctactccacttattgccaaacaaaagttcgattcaaactggcacaagttcaccaaggactcgatattgcccgatatcgacgagtctcagaatggagaacaaaccattaatgacctagtgaattctctcaatgcaggtaagatagacagtaccaacaagcataagtatacttttgaggagctccttgctgcgtggctgaaactaatggacagtccctttggcggccaaatcatacaatatttggaagacatagtagagaacaagacaattaatggaattgacagacaacaagagacgaacaatctattcaagacacctcttagaagtcgcacaaattcaccagcaaacaatgaatcttccgatgaagaagacaacctcagcttgcacactccattggttgctaatactgaacgcagagctcgtcgcatcgatcaaaatggcagttttggaccccagaaggatatagagcaggacaataatgaagatatagatcacgatacaccacgtacaactccaccacattcacaggatgagatcaattcgaagtttcaatcaacgatgatagacatccaacctgaattaaacgaaaacttgggatcagaaaaggtccgcaatttagaggaagagatcaaaaagttgaaggaggaagcagaaaagatgaaagaagaaaacatgtcgttgagagaacaaatttctaagatcgagaattccaagattgtgcccgagaagttagatctcatagatattacgcttgactcgatagactttcaggatcaaaaagtaagtgttgatccagagttgcagatattaaagaacgaaaatctggccctaaaggctaagaactacaatttgaccaaacaggtagacaatttacagaacaactacaatgaactttccaacgaaatccggtatgaaagggccaatcagaaatccaccggtcaagacaaccgtcaaatgtgtcatcccaaaccacaagtggaagaacaagaaacgtcaactcccacaaatcagaaattaaagtttgccgaagaagaaattgaaaagttaaaatcggatctttctagactcgcaagcgaggaaattggcgagaagaacaatttgataaccgagaatacggtggaagccaggtttagacagtactacagcagacttgagctacacaaagtagacaatatgaccaaggtggagatgtccaacttgatcaagaacttgatgttatctctactcatcagtgacttctccaatttggcggtgaatgcaagaaaattcggccggtttctcaaattggcactacacttcttagatagactccattctgttatctacgtgcagggagatcccaacatcaagccatcattctacgtgaagaactcgcaagatatccaggccatggaaaaccttggccagtgtctccacggcatgttggagaacgtcgaggtgcttcgcacgacatccaacggatggtaactatgggattacgtcacagagtagtcacactgcatacagctttgtgaggatggctggacgtgggaattgatacagggaacaatgacttcttcctgtttgggcacggggacgacgtaggcttatagacgtaaccacaatatggtgtcaaaatgacagtattatgtcgaatagtagatgacagtagaagcgtatgagatgatggctggaggagggatcacgtgagagaaaacgtagatggatgaagatgtaagatactatagaagaataggaattgaactggcagcgacggaaatgagtttcagggtcaacgacgaggaaatagagtatagtctgcgaaggcgtggagaatcgtaggatacgagatccttgcgaattgcctactgaaaggaataaagaagggatgtttctgtgctcttttccaatattcagaccgtgcgggtgaattcctctgcaagactcatgacttcaggcagggagagactttgaagcgactcagtgcttgtacagacaagcggaaagcagacaagcagacaaagaagtacaagatagatggtacagatagagtacataatcagtagatattatcagtagtcatgtacggccatcttattgtcgtaccgattgccatattgtagagttcctacagtgccggctaagtctaagcccatggcagcagcaggtattacgtatggagcaggcttttatctctccgctcggatgacgtcgccgtcatgaaatagcagtgaataataatgggacactggcaaaactcgcggcttgtagaactggtggatagcagatgggctatttcttttagtgggaaagctgtggagctgtattttcgttttaacaatcactacaccttctacagtgccgccatcctctctgtagctccatatagacctcatactctccagcagccaggctagcgtcccagtacatctctcgctagcaccgcacctctcaaccccattcttggtccacaaacactcgcacacatctcgtgcctgaaattcgtgaatgacataatccatcactagatcatgagcaataacaaagaccaagtacaagaataagagtagaacaaagtaacttatccaatttactatacttcctatacattcaatacaacccacacaccctatatttttgtgctagggctacactctcctatatcaccgtcgtagcctccattcaccatccattcaccgaacccagagtcacatagtcgcacttccgatagcatcccactatcaagcatcttttttctggaggtgaaacccagtggaagctgtactcgtttcccattccagcttcttatcccagagctgcgctactcaacatcccagtctcctcgccatgggcaagtctgccgtgtcgtcctcctcgtcccgactccaccagcgaaccccagcctccggctcagcttcaggctccggcccaattccaggctctgcactttcccactcctcatcaagccatacttctgaatccgcggacccctcagctgcacgcaactcgttggctcagtcgaactttctcttcaatcccggccgccaggactccatctcctcgttgttgaacaactaccagacctcatcatcgggtgcctataccctcactggtaggaccatgcggtcgcagaaccaaaacgcgaaccaaaaccagaaccaaaaccaaattcaaaaccaaaatgaaaaccagaatcaaagtcatgataatcaaatgaatcgtaaccagcactcggcatctcaattaccaccgtctcagtcccaacaatcccatctagactcttcctcctatcccagctactatctaaaccatcgcgactctcagatacccatcagaccccgtggagatagcatcttcctaccgcctcccatctcgtctctgcacccttacgatggcggaatggctccaggtggttcaagccagctgacgctcaacgtctcaaatccgtactcatcaagatcaaacagcattttcagctcgttgatccagatcccgggctcggcccgaaactccatcagcgagggtggtggatctgccacaacaaataagggctacaattctgctggcggaacagcttctatctccaacaactcatcaagtcataaccaatccaatcacagtaccggtaacaataacaacctaaaccttaacgtaaacacgagtggtaacagtaacaataacaacaacaatagtaatagtagtgccaatgccgtttccagctcggctattccttcgggcagcaacaacagcaacaactcaaactcaagtggggcctccgtagaggtacccatgagaggaaggctgttgtcgatatttccctcgctttctcagggaatgccagaagtgatatcgctagaagacatcgaaaatctcctaagcaaagagagcttaggtaacatcttggcctggaaccagcagcaacaacaacagcaacaggatcccaagacccccgctggagccagatccaagtttggctcgctagacatgtcgatctggaacgataacagcaacaacggcaataatgttagcagccagtctatggcaggctatggttccattggaggtttcaatggcagtttgagtgatttcatagcgggcatgatttccaatggcagcatagatttgagtaacatgagcaacgaacagcgccgtgactcgatcttgaagatcatcagcgatctgcaaaacttgcgtaatcagagaatccccagcgatggtgccagtgacaaaaaccccaactcaaggatttccattggtacagacaacagtggcgcttcaatgggtggtacgacgttgcgtgaagatatcttcgaccacaacaaattttccgtaggatctcgtagcaaagatatgaaggataatcgtagcagtaacgtggaagcaagaacgagtcctggcaacaatgctaacttgaatgtaccaggtaaccacaagggccatctttcaccaacttcgtccatgtcttctcgatcctctgctaagtacaacgatgaaccacaactgccaaagacttctcctactggctacaccataaatatgaacactcgtcaaggtcagattcctccacaacagcaagaaatgcaactgcctaaccagcacttgttgccccagccgcctattccatcgcagcgcatattccaaaactaccaaaatgtgtctctccagaaccagaaccccaaccagagtcaggttcaggcgaaccaaaatcttcaattccaaacgtacgcaaacccagctcaaggctcaatgaactttggtaacactttgctgcctggaataacaatgaggaatcagctaccagcacagcaacaatctaactactatacaaactcacaaccagcacaattgccatatcaacaacaacagcagcagcaacaacaacaacaacaacagcagcagcaacaacaacagcaacagcagcaacagcgacagcagtatttacagcagaattacccagttcaacaacaagcgacatcgcctcagatgggcaaaccaagaacgtcaaagccccgtagaaattctaacaaccgtgatgccatctcggatcaatcgttgaagtctcccatcgaaagcagcagtaacgaaggtaacttggtaccagcacagcagtatgtaaaatctgaagatggaagacctttattgggcgcaaccaagattgaccagttgatgttggttattcaagccagagacaaaggtatcacaagtcctattcaacaagctcccgacggaagcattttggctgctcctgactattccctttccagagacaagagcgaattggataatggtgttttgccacgtccaatcagccttgttggtggggtggacaagcctagcaaggccaagataaaagaggacgagggtagcgacgatgaagaatccaaaggaaagagaagaaagcacaaaaaccagcagtgtccttattgtttcaagtactttactcagtcgacccatctagaagttcacattagatctcatattggctacaagccattcgagtgcaactactgccacaagaagtttacgcaaggtggcaatttgagaacacatttgaggcttcatactggtgaaaagccgttcacatgcgacatctgtaatcgacaattcaacaggaagggaaacttgggtgctcacaaattgacgcacgagaacttgaaaccatacgaatgcaagttggatggttgcgataagtctttcactcaattaggtaatttgaagtcgcatcaaaacagattccatctcagcactttgaaccatttaacacaaaagttggctgagttaagcggtctgtcgatcgagaacttgcctccagacgagaaggacttgcttatgtatttcaaagacttgtacaagaactcaaataagggtattcgtggcagaggtaaggctaaattatccaaagatgatactggaggtgcaactagcagttctccagataatagccagtttaatttgcaatcccagtcaccccagctgcagctgcagaatcttcaagcgcttcctcgacaacaggaccaacagcaaggttcaccggagtattcgcaatcgcaacattccctcgattttatgaatccccatttggctgggtctattaacggttaccaagggtaatgtttacgatgtactagtttttattatgcgagagcccctcgcgtttatttcatttcatgttcatgacttatgccatttatttctttattgttctttctttatattttcattattaaggttattatatgtattatcagaggtaaaggtacgactaattgtttgctagaatgtagaaaagtaaatagtattgagagaatataaaaagcaaggctatgcaagataaaatattgaggattaagagagattagacataattaaggaaaattagcaattgaatcgattgcaaataaatttcagagaagcacaactgaataaaaatagacccttcaaaatataaacgcgactactcacggagttgttgatatgacaatgtcgcgatgtcgtgcctttctttttccacacgcgacatctgttgatcttgccaacaggttcgatcagaacttatagctttttcttctagtataaccacaatagctgtagagaatcaatgaacttcctttccagtgcgttgaattccttaacagggtcttctattccgtacactcttaaagaaaaaatcgtggatcccactagcacttccaatttggtgaatagaaactccatctggacagtgtacaatggcttgaacccgaagagtgatcagtcgccagtgaccgtatttgagttcaatcttaaggatcctgtgaatattcaaagacgctgggagcctttggcccgaaatgcattcaaaaaactcaagttgatcaaatttcctgctattctctctgtgatagactttatcgaaaacgattcttatttatacatcgtcactgaaccagtgatccctttgcttaattacttgcaagattcggaattgccattgtcccaagatgcgaaattgtgcggccttcaatccattgcccaagcattgctgtttattaacatgtcctgtagtagtgtgcacggtaatatcaacatttccagttctgtttttgtcacagcactgggcgattggaagttgtttggttttgaattgttaaccaacttgaagtctgacccagaccaacctctctatagactttcagggtcgtcaccggatttcagaaacgtagttccagatgaagtgaactctgatggagtagaagctgtcagaagctttccaattaaacttgactcttacaagtatggtgcgtttgcttaccaagttttgtccactagtgacttcagagatattagctctcaattcgatgctcgaaacatatctagcaaggtcattccaagcagaatcgcgggcccattgcgaaagttggtcaactcaaagttgaacttgagaagtagtatcgataagtatgaacaagaaacaagttctttcaacaacaccaacgccctcataaagcttaataagcaattggaggacttcaagttccaaaatgacgaacagaagatggagttcatcaagtttgaattgtctggttatttcggagaaactcatgcagaggggtattttccttctggtttcttgaactataagctcttgccagaattaattagccaatttagcgctttgtccaaagtcaaaccaaccgtaaacacgtcaccagcagaaactcaacagcgtcaagaaactcttgctttgctcttagactacatcttgaaatttggttccaagctttcagaaattgatttcaacaagtctataaaaccaattattcttgaaacattcaatcttggagacagatctatcagattagttctcttgacccacttaccaatgtatgcctccttcttgtccgaatccgatatccaactgagaatatttctaaacttgatcagcggtttccaagataccaatttcatgattagagagactacgttgaaatcaatcactattgttatagataaaatctctgtaaagcaagttaaccaagacctattgaaggtattggcgaagtcacagatggatcctaagccatctataagagtcaacacgttaatcttaatcatcaagatttccagcaagatttacaagaattccaagaataatgtattgataacagcattatcaaagtctttgagagacacatttacccccagtaagttgactgcattgtctggttttgagagtctaatcgatgagttctccttagatgaaatttgcacaaagatcttgggccaccttgctatttcgttgatggacaaaacttcgagcaaggtgcgtaaggaagccaaaagaatctttcaattgtatttagactcagttgaagctcacgcgtccaccttgccaaacattgatgcagatgatgaggctgaagaagcagagtttttcagtaaatatgctccgaccatgacaaattcaaacactacaagcaatgaagctaatgatagttctaacggtggtggagccctctcgttgggctggagcatggtcaataaatttgttggaccatctgctgtgcagggcccattaaaccatgacttcaacaattccacgcccgatttaaccagagaagcgacacctaccgctgagaatccttcaagaataccatcaaagaaacaacaatcttggatgagtgatgttgtggtagatgatggagacggttggggaggctttgatgacattgacgatacacccaagacgattgttgaacctctagcagcaccaaagaaatctacccccaaaccaagagtcatcaagaaaacggaggcacctgtttcgggccgtaaaatttctggccttaagttgggcgccccaaccaagaagccaatctctgctttaaagttagatttgacagttgaagatgacgattccaaggcatgggatgatgattggtagttcaaagttgtattcgtttaggatagtagtgcattagtaataataataataatttagaatatttatcgcatacaaatcacaaataaatagccatatcttaagcagaaaagatgacattttcaaagttcatagtattgtcggtaaggtttcgctcctgaattctcatcctagcaatcatccaagctatggagatgttcatggaagttgaaattttctgctcattgaaacttgagttttggaacttcgaggcaaagatttcacttttatcaatgacatacaaagaacgtctaccagacataatctcatattcagtttgatctggaaagataagattgtattcgtcgtcatcaaacttgataagaacaccaacttcttctgtgccgttaaatttgaaagcaaacctctcagtccttgtgtctctgcttcccttcattttcacaatggtgatacctttgtcaatcaaggaattgtactccagcaactggaattgcatttcctcccatggttgtcttttgttgtattgggccaggctgggagggcagcagataagaggattgtcgtcatctgtgtaatggttgccaaaagcagtagcttcaatgtggttaatgaacttgtccaaggtaaggatttcgctgactgttaagggcaccgaaactttgatggacatttttatttctagcagaaggataaacctgatattcggattgatattccagcttctttctggttgcaaaatatagcataccgctagatgaacttctacactgaaattttgcacccattgcgatatccacaaacatgtactatcacatgcaggaatatctaattagctattttgcaaccaaaggacataaatcacatatacaaacgaattatacataattacaacaatagagacatcggtaaaagtcatttaatcataaactaacagatacatgttttaaaaaatgttcatattatctctcttcatgcttcccattaacggctccaaaattcgcaaaaaataattttatcagattagagcctgaagtgacctcatcatgaaacggggtattggaaagatatggtttttgaaagatatggagttgaatgaagatacgctttctcactatttaggtatgctatcagtgaattcgttcccttaatcatttgataaaatgcctttctggtgacgactttttggctccggttcatttgaaatatcttggcacaaaaccgcccagaataatttttcttggtgaaccagttggtagaactgctgtgggggatttagaatctacggtggctggggaggataaaataggaaatcaaagggccgtacgattgtaagggattgtaaggtgggcgttggcaggtatgtgaagtccgggccctcggcggagaagtctgggctactatcaagtagaacaagctttcagtaaaccaagcatattgtggcaattaattgaagaagaatttcgaatgtggctaagggcgataatgtaaccgacatttgagagctctaaatcccaaattcccctggctacatctcggtaggaaagtaataaaagtataagtgaagaagaggggcggttaagaaattacgcaatttggtatttgttagcagggaagatcaaataaaagtaagaaagagctcagttttcctaagccacagcaaagtcgcttctacgtatgctaccaatgttccatgctgcgctttttggaatagcataatggtgggccgtcattgataagtaattggttggatagaataatgaggcaatcacgcaatgtgtgcgataaaagttcttagtgtcagagccattcatatttcattctgtgcggttttcaaatagctagaagcaaatagccgccgataacgagtggctccaataatttgtttttccaagaagaattttggtctaccaagaagaattatggtttaccaagaattttagacaaccgcgatgtcacaattctatagagccgtgtcaagaaacggaacgcacaagaaatgacatcagttcctactggaagctgaagagcagaaaacattcaaattgccttgccattttgttatgatctaaaacacaaatgaatcgatctccatgatccaagctagggggttaatatcgtctaatctttaaactgtacaaaaaatcagattagaaaattgaccaaaatggatgaacttctgaaactgcaggagcaaaaaaaaaaaaaatgcaacagggcattattcggacaattgattgcaaaaagcgactggttttccttggctgattttcatgtgttctgtttcatagcagccatatcttatcattcaaaaatttcctgaataagatcaagcaagagtgccatttgatagcattttagctagctatggcttccaatctgtgaggcttcactgtttggagccatactaagcagaattaattccaagcagaataaattccaagcttactatttaattgattcgagtttccaggaaactactcaatttgtttatctcacctccaacaaaaatgtcaaaagaaaaggtagagttggaaaacatcatcagtatccgttcaacaagattggacgtggctgatcatgaaatcgacttgcacgctgttgaatcagctgccttgtcactcaaccatgttggccaaacgttcacatcgagtcagaagtactttatcttgaaaagattgaactacgagggtttagaagatcttaatgacatccctccaggagcttcattcatgattgaaaaaactgaaaaattaacagaacaagaatctcttgagataatcaaggaagcaatcattgaacacagtgatgatgtcaacattccgtcccgtgattacgaattatgggaaaacttggttgaacaggccccaaattctttagatgggcaaactggtatcaaggaaaaattgaactataccatcgaagacgaaaagggtctggttgatcttgctgacaatgaaagcggctacaatgattactatcaaatcgttaactggaacttgcaaatcagacttgaagctgcacttgttgcttaccactctccttaccccgaagtgagagccgttgccgattgttatgatgatcctaccttgccagttgaaacattaagagtttacatcttgggtataatttggactgctatcggtgctttcattaaccagtttttcgctgaaagacaaccttcaattacgttgagtgccgctgttgtgcagttgttgctttacccttctggtgtcttgattgccacaattttacctgcttggaaattcaaaatctggaaatgcaccatcgatttgaatcctggtccatggaaccacaaggagcaaatgttaacaacaatcttctattcagtttctgctggtacaagttatgtctcatataacatccatgttcaaaagatggaaaggttttacaacaaccaatgggccgacttcggttaccaaactctcttgatcttgtcgactaacttcttagggtttggttttgctggtatcatgaggaagtttgcaatttatccaatcagatctatatggccaacaaccttgcctacattagccttgaataaggcattaatgcaaaaagaaagaaaggagaatattaatggctggactatttctaggtactatttcttttttgctgcatttctcttttcctttatttataactggattccaacctatcttttcaatgccttgtctactttcaactggatgacttggattgctccaaacaattttaacttggtaatgatcactggaagtgtgaagggcttgggattgaacccaattccaacatttgattggaacattttaaattggaactatgcattggtttttcctttctactcgcaagcgaatcaatacattggtagcattattggcttcttcacgattattgctatctattggactaacaacaactggtccaaatacattcctattaacacctcttctcttttcagtcagattggtaccagatatgatgttaaagcaattgttaacgagagaagtttatttgatcaacagaaatatgaagctgttggaccaccatactactctgcagctaacttggttgtctatggtgctttctttgccatttacccatttgccattgtttacgaagttttcatgaactacaaacctatgtggaaagcattgaaaggattgggtactgctcttaagaacttcagaaaatccacatatgaaggttttgacgatccacatactaagatgatgactcgttataaggaagttccagactgggcatttgtatttgtattggtgatttctattgtgttggccattttgtgtgttaagctttatccagctgagactccagtttggggtattttcttcaccgttggcatcaacttctgtttcttaattccattaactgctattttctctactactggtttccaatttggtcttaatgtcttggtcgaattgattgttggttatgctcttccaggtaacggtttggctcttaacttcttgaaagcttttggttataacattaatggccaagctcagaattacatttccgaccaaaagatgggtcactatgcgaagatacctccaagagccatgttcagatgtcaaatgctttccgtcttcattacttcgttcatcggtttgggtgttatgaactttaccatgtccagcgtcaacaactactgtgaccccgagaacagacagaagttcacttgtcctaacgcaactgttttctacaacgcttctattctttggggtgtgattggacctaaaaaggtgtttgaaggtatctaccctgtcatgcaatattgtttcttgattggcttccttttggctttcccatgtatagcctttaagaagtatggtccaaaaaaattaacgaagtacttccagccaacattgattattgggggaatgttaatttatgctccttacaatttgacttattacactggtggcctctacctttctattgcctccatgtggtaccttaagaagtattacactacttggtgggaaaagtacaattttgttttctctggtgccatggatgccggtattgctttcagtgcaattattattttctttgctgtacagtatgttgataagagcatttactggtggggtaacaatgtcccataccttggtatcgaaggtggtgaaggtcaacaaactcttcttactgctgcccttgatgcccctgatggatactttggtctcagaaatggaacctatccatagacagtctgggtactttttaacaatgcttggtctatgatttagttacattgtgtatgcgaaatagtgaaaaattaattccatttgtagcacaagggtagatatgttatgctatctgactagaacaaagtcatgcttgtgaagtcattatggctacatttagagattttaattccgcttgggcattaaaatccgagtaggcgggtcttgtagagagtaatttaaacaatgtgaaattatactgagcagcgtattttctatgtcaaaatccactgtgagatagaaaatagtagacgcatggaaatgcccttcggatgcagttgcattcattccccgagaatagcacgagtcatagtggtccgagaagccaaaatctgtggattcgtagacttcaaaagtttaatgcaaactctccacgaatggcaagcgttcatatacaagcagcagagatcgttgaagtggtctgagaatttcgtctggctatgtgtgagacaataaattaataccagccattcaccacaagatgtgcacctctacacattaactacactgtgggtgataagttgaaatatatgggattcacaaattttaaaatccgtctctggaaaatggaaaaatagagacctctattagtatcatgtaagcatagcagtaataagaattatacaactacaaaactcaagcagaacagaaacgtccacagttgaacgaattcattcctcatcgactttctaagcgaaattgacccccacaaaatcagcacacttcgtgcgactggtgagcgcactcgttggaatttacatgacttccacagtggacgatttagctaacgagacgaaatctcagtaaactcaggctaattgaccctggtagcttctcttatgtagttccgtggctatgtatcagttgtaagtacctatttgaagccaattgagtatctctgccatcgcaattgccgtttttcgtactcttctagcgtctctctcacatctgcccctccatagattttcccgcccacccctcatctttttcactccactatttagattgggccaaatctacacagagattaattttccacatctttctttttcccgatcccagcgtattgccttactccaaacacagacaatgtccgatttctccgtccagaccattgccaccacggccttcacagaccaaaagcctggaacctctggtctcagaaagaaagttactgtgtttcaacagcctcactacactgaaaacttcattcaggctattctcgatgccattccggaaggtgcccaaggtgccactcttgttgtaggaggtgatggccgtttctacaacgacaaggtcatcaacttgatcgccaaaatcgcctcggccaacggagtttccaagttgattttgggtcaagacgggattctttccactccagcaacttcgcatgtaatcaggatcaggggtgcaactggaggaattattctcactgcttcacacaaccccggaggccccaaaaacgatttgggtattaagtacaacttgggaaacggtgcaccagctccagaatcggttaccaacaagatctatgatgtctccaaggaattgacttcgtacaagctcattgatttacccgacattgatttgtccaaaacccagaccgtgcaattgggccctcttgaagtggaaatcattgactccacctctgattacgtagccatgttgaaggatatctttgacttccccttgatcaagtcgttcctcgagactgccactaaggagcagggattcaaggttttatttgattcgctcaatggtgtcactggcccctacggctacaagatcttcgttgaagaattaggattgcctcttaactcaatccaaaattaccacccattgcctgactttggtggtttacacccagatccaaacttgacctatgctcatactttggtcgagagggtcgataaggagaatattgcctttggtgctgcatctgatggtgacggtgacagaaacatgatctacggtgctggtacctttgtttcgcctggtgactctgtagccatcatctcggaatacgccgattccatcccttacttcaagaagcaaggtgtctacggtttggccagatccatgcctacctctggagccatcgatttggtagcaaaggctaaaggattgaatgtttacgaagtgccaaccggttggaagttcttctgcaaccttttcgacgctgacaagttgagtatctgtggtgaagagtcgtttggaacaggctccaaccacatcagagaaaaggacggcctttgggctgtagttgcctggttgaacgtgctagcagattacaacgtcaagaatccagaatccaagacatctatttctgtagtgcagaactcgttttggaagaaatacggaagaactttcttcactagatatgactacgaaaacgtatcgtctgaaggtgctgccgagctcatcaacttgttgtcttctattgttgactctaagaaaccaggaagtagcttagctgatggctacgtcgtcaaggaagctgctaacttctcgtacaccgatttggacggctctgtttcgtccaaccaaggtttgttcatcaagtttgaaagcggcttgagattcatagtaagattgtctggtactggatcatccggtgctacagtcagattatatctcgaaaagcactctgccgacgaatccacctatggcttaggcgtagaccagtacttagttgatgacatcaagtttgtcttggacttgttgaagttcaagcagttcttgggaaaggatgaaccagatgttcgtacctagaccgagatttaatctctagacttgcctaattctgactacttagtcggctttgttcgagtttgcctactcagttatagcctcttacttactcgttgcgataaatacacatacattcacaatattaaaacaggtggtaacttttcaagtcggttatattaatatacaaggaaaataaatatatatatatagaacattatatcagcaattcgtaacataaaaattagggaagcattatttcaacttaaaattaaactttaatttgaatttgaatatcaatcaaacgtcgatacaagtcagatgtcaacataaattataacactaagactttagcatctgtccttcgaaaagcattcttgcttagtatcttgccttttttgggtcgctgccgtattcgtcatcgttatctctctttaaagaaggcaacacgatgctattagatgcggaggctgtaggttcagtcaacgatctaatagcaggcaacacggtagcactctgttgatggtggataggctgtatatcaccaaatctgttgattcccgacagaagactagtggccggaggaagggtgataccagcggctggcacatgtacaggagcctgtgtttgcactggagcagatgtctgagaaattggaactgcaggtgcttgtggtgccgtaaagttggattgaggtgttggtacagatgaatgttgatgagtcgttgcaggtacttcagaagtagttgcctgtggggcagttgaaggggcagcagaagcagcaacaggctgagcagtttcggtagcagcaggtggagcgtttctcaaggttagcacttcgtccaatctctttttcatagagctttctctgagtctcgcagcctgttccatagcttctaactccataattctggtacggtacaaatcgttcaccaactccaactcggatattcttgttttcaacaacgtcacttcgtggttgttgttattattattgttgttactgttgctgttagaattagagttgttggagttggggaatccgtttggttgttctccatgaggttggttagaaggctgctgcaagtggttgtaattgctgaagctgtgctggatgtggggcaattggtttttggaatcccccgattgcgatgctacttggtgaataggaggaagcgaggtgtggctggtttctggcgattgtatacgtgaaccgtttggagtggaggatctagagtatgactgagaggactgagggttgaaagatggagaagagagcttggaacttcccaaagctggcaacttaggagggtgctgttgtggtgtcgagcttgcggtcttcaaagccgaagaaaagattgctgaagaagtcgagggagactctctttttatgttgctattgtgcttgttcatcaatgaaacaccagcgatggtggttccttcatttccagaagtggatgccgagttcgacttaaatgttgcacttggtcccaactcgttcgacatgttctccaaagctccagcagcagcgtgtacggcaatcattttgttgtcagagttcgttctggtgttggagactgacgaagaggtcgacaacaacaatggagacgtgattctctgtaaaccaggggcaaactgagtaggtgtagaagaagggtaatgcaacggttgaactacttgatggcttgtaataccattagcatgaccctgtaagtgtggaggcaagtggtggtgatgatggtgatgatggtaggcatttatcggatgtggaaatcctgggctaccctgagcatttcccgatgaaggcgctccagctccactggctggcaacaaaggagtcaaagccggattgtggcccatcccttcattaccagattggttgggtttgcctggtttctttgactttggagacttctttcctgatttggaatccttagatttcaattccggtgtgttgggactggaagacttattggaaccagggccagtggcatttccgttctgttgcttgattctgtttctcgacttgatagtgtcagtcttcaacgagatcggtctgggacgaccgtgcaacttcaagaacaacccacaggcgttacacaagacctggcctgtttcgtctcttctccagagtggtgttgtttgggtcttacagtttcgacagataggactggtgatgttagtcttagtggttgtagttccgttgttgacatgtgtagttgttttagcgttgggatgcacagggttttgtgaaagtggacccagctgtgggagaggaggagcgttctggagctggtgctgaagctgagcctggtgctgcggaggcacttggttgattacttggacgggatgtatctgttgagttgtttgaggttgttgaattgactgttgaacttgttgtggggattgttgagctgattgtggggactgctgattttgctgttgaggttgagctgatggctgagttttattgagatgggagatactggggagagtagtcgtttgtggaggagaaacttgggattggctctcgttaatggggttcaatactggttcctgtttcacgactgtcttagaaccttgttgctgttgttgctggaaagaggcagtagtttgcgcaggagccgaggagtgaaccagaggctgttgcaccgggggaagacgatgttggatctcactcatggttcgaaatggtccaaccgacggaggaacaggatgagggtaatgcaacttggcgaatagatgaaaaatatagactgtttacttggagcagacagtaatgagaatggtacttgataatacacggaaaattcaagatttaagattcagttgtcgaggaatatgaaagagattgatacgatatatggatacaatattctcgataaataccatgcgaatattctgataggattctgtagcaatatggtcctgatatggtggcctatatcctcgtggtagtcatacaatagattagtgcgtatagaaatatagcaatcgcaatcagtaagaatctatgagacgtgataacgataagaactagcaaacgaaagatggacgttttcagtcaaggtgatacgctacgtgtggaatgggttttactcctaatcagcaaacacaaatgttaggcggatctcttacacaccttggattctcaatattagagacaggtaggtacaataagcttcagttccgcacagacctgttgacgtgtactataagtaggacactgtggatacgtgtttcagtgttgctaaagagcggtgtggacagtctatgaatctagtcaagtttgctttccagaggaaaaaacatattactagataaaattttgctgataaattttcttcttcctaccggttcacacactatgggattttagattattggagataaagaaagatgaaaaatttttcgtatcgtcgtgcacagggaagatccgagggcgatgcgacctggggaggtcgggaggaagtatgcctccgaggcctgtagtagtgttgcggcaagggtctactcacatatccggggtgtgtcttatcgtcttatctggccgtttccgaaacttttccggggataaccgagggcggatgacggatgtcgccagcaatcagataccgattattgcctgaggcacagctgagagacacggaactcgtagatattttccattttcagaagcgattgccagattcaggagcaaagataggtaccggtgatcatgacagcatgacagtatgacagagaaagtcagttctcctgagccgggagctggtggaagaagtgactattggctgattctggtatatccgtaatgtcgtgcggtagctgccaaggccatcgcccttttctctatcggtttctactcgcttctatatgctcttattgctctggtttcctccctcgataaacggcactatcctgtttggtacaaacgagccgaaatgccgctgggtctagaagcgctgtagtatgtaggatgtagtatgaaatcacaaattgcgagagcgacaagagcgtgtgggactggcgtggcgtctgttgaagatggcgacgaaggtctcttgtcagcggccttactggtggcgtagaccacacagctttctccgtctccatcgctgctctgtagccccgtacacttgagtctggcgttggttatagaaattcacgtgctcgccaggctgcaggaccgccgtgcgctggggatttcagagcaggcctaggtggtggtcctattttaagaagggttaacggtgtgaatcaggtgatcgtttgctgtcccggaattgatcgctgaggccacgaatcgtctgggtggcccttcgggtatcggatgtgttaggcgataggagaaccggaagttgctaaggatgtagagtaattagatgcagattgaaccaagcagatagaacgattcagcattttagagcagattagataagatcgaacatacagattagagcagatacagattaatcatagatacagcaagataaagacaatatccaatttatggcaatctgacataatctcttcagacagccacagcttgcattagtaccagaaagtgccttgaggctagaggcttctgatagacgagtacagctcctgtgtgtatgacttctccacaatggttgtggcagtactttactgatgatgcagacgagcaggctgcaatgaggctactcttgtgaaatgcaacatgacaatgtctcaaaaacggccatatttgtttctagttgttggtgcacatggggtcggcaagacttctttgttagccgagttcatttggccgcgtacctctcatgaagaccagctctggcaaatccaagaagcgagagctgaaaatatagatattgatggccgcgaggtcaaacttgtgctaagagactcgatgggtcgagactactacgatgcttttcgacctcttttgtatcctgcggtttcgatggtgctagtatgttttgctgtcaacgatcggctttcgtttgttcaagcccagaccaagttcttaagggagtgtaaagagtatgcccctggtgtaccttacattttggttggatgcaaatctgataccagggaagaacggattgagctcttgcttgtactgaaggaggaagcaaatcttgcagccacaggaatgaaagcttacagatacatgaaatgttcggctacggcccacgaaggtgtgagagaagtttttgaaacggctacaagattatgcatgcggttagaatatgaccaacactacaagaaacagagcagaaaaattgctaaaatgctgaaaaaatgttcgataatgtgaatttctaccagaattgtagccaggtagacttatccacaagtacgatccacagctacaagaacacgtattacttgtatctatggttgactagtttgcttttatctgaagcatctttgtgattaaggaggggagaagagatctccacatcggtgcactttgtgtcgcagccataactgttcggtacggcaatagaacgatgataccttagtatcctgtgtggatgtgggttatggaaacgaatttcaactgctgtatgcatacgagagataaggccagaaaatagtggccctggccaatgagtatgccagactcaataggaggtggaaaataggagaacgctggcgagacacgaaattaaggagggttacgctgggtgcaaaatcagtcgcatgcataagaacacgtcgatgaatgacaatgaattgtagcgaggtattgccattagctgttcttgtatgatctattctgccacggaggtgaacttggtaagcttggtttcctacacccgagaaactagagagatattatccgagagaacgactgaagtggtatcacatctcgcaaaaaaagtgcacttcggggtttcacaattggagggcgttgttggaatttcattatataataaatatctgggattaaatgttaatttagatccctaatgatgatatctgttgttcatgacaattcatagtaatacgaatctgcccagaaaagtaattgctatttagagctcataattacattgcaagttctagcctcgccaataaataatgagcttcattacatttattctaccttcattaacaactgatatttgagccaattctgttctctacactcttcgtgacttagtctacgctatgcttattgtatcgccttctagacgagggccgcgtcacgattggcacacgaacccccctgacaacggaacggtaggtacatttccgttaggtagtattagcgaactttgcaaaacaacgagagaaaaagattccattgaagctctagatcgtcccggcgtatctggaaatgtatacaaacatattatttagtgagatctgatagaataaacgaaatttctatgatacttcgtagaaatcttcgtgacaatcgaaatgaatttatgtgaaaaaaacgcaattcagacgcaatcaaaattgctcaagccaaaataaagtctgtagagccaacctcagcatggaagcaactttcgagttttatgtagatttctaaatataacgcagacagcgtataagcacaagacaccactactttcatcgatagccccaaacgagcttacccagcccgacccaggcttagcccagtcattcgccttgtatgtttgtggtgtcgagaattttatttagaaacagtgaaaaatttataatttcctaaagagtacatgcaaaaaaaaacttccgccaggggcacgaaaaattaatttaaaaaatccctgcgaacaagaggaggtaggctttgttcatttcatagactgtagctgtggaactggaggaatttagatagtgtataatttcagttgtagtttcgaaatttgtcgacgagcaacttgcactttattccttgtactttagtaagcttcaccaaacttgactagactacactagacttgaccttgcttgagtatctaacaacgttatatagcctggcttatctgtttggttctgtaggcattgcgatttgttttcttctttgtgtctcgtctgtttgtaccaccatcgtcggttgatctgagacattgtgccgtttatcgaaattattactactcttattagtgatttgatttcattttccaatcatatcttcactccaaactattgttcccatcccttcatcataatactattgcataatgcctgctccagctgaaatccgtagaaagttggtcatcgtcggtgatggtgcctgtggtaagacctgtttattgattgtcttttccaaggggactttcccagaagtatacgttcctactgtgttcgagaactatgttgctgacgtcgaagttgacggcagaagagtcgaattggcattgtgggataccgctggtcaagaagattacgacagattgagacccttgtcttatccagactcgaacgtcattttgatctgtttctcagtggattcgccagactcgctcgagaacgtcttggaaaagtggatttctgaagtgttgcatttctgccagggagttcctatcatcttggttgcttgtaaggccgacttgagaaacgaccctgcaactatcgaaaccttgagacaacaacaacaacagccagtttccactgctgatggtcaagcagtcgcccaaaagatctccgctaccgattacttggaatgttcagccagaactggccaaggtgtcagagaagtgttcgaagctgccaccaaggcttccttgagcaagaaggaaagtcagaagagtggaaagaagaagaagtgtgttgttttgtaagcactctactagactacattatcttctttttgttcatcaattcctagtcttgaacgacttgattgtgagcttggtcaatctctatcgcctcgttcttgctaggccccttagagttctacaattcatgataaccattcatgatacactttcatggctgcacagagggactggccatgcaatttgttagcatgatatggcctatcctctataattttcatttaatattttcattcttgatgcgtggatctccacgattatatacaaatacacatatatacttgaaggaacttcgtaacgtgcttgtgtctatgccagtcctagtccagaaagcttgagtcacagttcacagatcattagttgacatcgaaagatagacccagctagaaatagagttttaacaaggggatatgaccatatgtcctcctacaacaaatgatgacaattacaagctttagagctgatttcgtctacgtgattatcatctcatagtacactttgccatagttaagagacttcatgaaatagtaaatgtacaactgcgaaagtgcatccgcagctaaagagttcaacacaagggtcggtaaattcagcgaattctcaaaacaattacactcaaaaagtcagcttttatatccccattatacctttactatctctaccaagtttcattggattcactcccgtatccctcgatttacgcctacggtaacaactctctccagctactcttctactctagccatactggcgatatcttttttcgatctgccacacacgaccctccacgtaaacaatcgcactaaaatttcgctatggatatttcaacacttagacagtgaaacaattccactttcactctgtctttcttgttcaaatcaaccaaaactatccaaaaatacaaaaaaccataccaatggcatcgttgaagtcgttcatcaaggctgtccggaaagctaagaccattgccgacgaacgggccgtagtccggaaagaatcggctgcaatccggacctcgtttagagacgtcacattggatcagaccacaagacgtatcaacatctccaagttgctctatctctatatcatgggcgaaaagacccattttggacaagtggaatgcttgaagttgctagcttcgccacgttttgtagacaaacggttgggctatttggctgcgctgcttcttttagatgaaaaccaagaggtactcactcttctcaccaactctttggacaatgacatgcaacaccccaacgcctatatcgtaggattggccttgtgctgtttgggcaacattgcgctgccggaattggctcgtgatttgtaccaaaatgtcgagaaaatcatcgcctctaataacgtctacttgaagaagaaagcatgcattgttgctgccaaacttgttgagaaggaaccggacttgtttgagttctttttgcccaaaataggtcaattactttcagacaaactgccagccgtcttattgggcgctcttcgcttgaccaactcgttgtatttggctagcgaagatactcatcctgttttggtgaagaatattcccaagatcatatcccatttgaaacgtgtaaacaccagcggataccagccagattacgatgtcatgggaacagcggatccattcttgcaagtagccttgttgtcaacgttgagaacgttggctacagacgaatattgccccgatcagcatcttgaagaaatcaacgatattttgacccaggtcgcttctaacttggacagtggtaaaaacgcagctcatgctattttgtacgagtgtgtgaggacgattttcgccatccaatcggaccagtcgttgaagatcttgggtgtaaacttgttgggaaaattcttatccaccaaagaaaacaacaccagatacgtagcacttgattccttgttatcagtgataagcatcgaaccattggcagtgcaaagacacagatccacaattgtgaactgtttatccgatggagatatctccatcagaagaagagcgttggagttgtcgtttgcaattttgaacgagcagaatatcagagtactagttcgtgaaatcttgacattcttggaaaactgcaacgacaacgagttgaagccctacgtcacatcgcagttgacgattgctgctaacaaatactcgcccaatgaaaagtggcatttcgacactttgatcagaatgttgaaactctcaggtgattatgtcacttctgacaacatctccagcatcttggctctcattttacaatgtaacgataacgagttgaaaaagcacattgtacagaaactacttacttcgtgtttggaagactctacacaatttggcttatctttgattacagtgtggtctcttggagaatatgccgatttggtattgggaaccaatgtcgaagtccattcgaaggaaattcttgttaccgacaaggttgtgctagacttaatcgacaacttgatcaacaactctacttattctgaactggaaacagttcaattgattacatacatattgacagctgtgatcaagttgtcggtgaagttcagcgatggggcatctcttgagcatttaagacagatcttgaatgccaggacttacgataacaacttggaaattcaagtaagagcagtcgagtatcaggaaatattcgcacaagatgtaagtctcaagagaggtttattggccagaatgcctgctcctccagtcaaagaaagagaatccttgacattacagaaagcaaacaacaaggctaaaagagtaggatcttcacccaactctggtgttccttccactacagaagatttgttacttgatctcatggatgataatggtgatagcaatggtgtaaatggaaacaaggatgctactgcattgttgtcagatatttttggtggaagcaatggtactgtaagtgcttctcaaaataacaatgcagccatcttggacttgttcaatacatcaccagcagcacctgctgctcccatagcagtcgctactcctcaggaagaaacaaattccattccagcattttcaaacaacttcatcaaagtttcttttgtgcccaagtccttcccatccaatggtgaagccataatagaagcacttgtagattcgaattctgctagcacagtagagcaattccaattcctaattgctgttccaaagacccagaagttgacgatctcgtcgtcgtctgaaggtgacactttggtaccgggaggaagaatcaaacaggtattaaagttggcaggtaagcaaggatcgaaggtcaagttcagagtcaaggcaaagtatactgtaaacgggaatgctattgaggaacaatttgactttggtgcctttagtcagactctttagacacaagtatagcgtgtattgcggcttcactcttaaatgatcgaaaactacatgtaaaatagactttctagtacttccttcatacctacaatataagttaatattagtatcgaatgattttatatatctaactggttcaagctaaatctgactattcgtattgaagccactatgcaagttgatcttagagtctattgatagatctcataaagcgatttaattctattgaatctgacagtgttactaacttgtcttgtttgcaagctctttagtgtcttcaattcagattccaataacaattcttcttcgtggcccttgacgtcttctctttcacatttttccaacaatatcttgtggtcctctctaaaagcctgaatattggacaagatctcagccattgagaaaattagcgagttgcacaagaattcgtaactatagaactccttgtgtctgaacaagtagaatgttttggaagcagctctgtcagcacttctcggaacttcttgaacttcaagcatgttagctttgagcaatttgtagatttcatttctaacggttttttcttttaataatacagagttggaaatcgtcttctcgtcaccgatttttaatgattttaagcatctcaaaattctgaaagagttgggacctaaagtcgtcttgaccaaagtctcaaaattgtattgcttcaagtatttcaacaatgatgcatatgggacggtataacttcctggtgtaatttcaatcaacaactgagcccctgatccagaagataatagttttaaatgatgctgaattaaggaaatagactgatgatcaaaactactgaaatcaacattgccgttgccgttggattcgatttgcacggttccattagattcgagcgattccgcaatatcatcagaatcttctgtttttatctttttagttggcctctcgtcatcaccattgctggctgatctcttctttggggtgaggttatgttttacaaagttgtaagttaagatagagtttctcaagtctagatcatgcggaagtaatcgtcccaaatctctgacgttgaaaacagttttcttctcgtcaaccaacttattttctatggagttgacaaagaaccgggcctcttcaggatcgttgatcaaaccggaaatttgtaagaatgggtgtgtgagatcaggactcgacgcttctaccaatttcaatgcagactcatagattctggccgataataatcctactctggatttggccaatgagacaagagccgtcgtcctgaggtgcttttggaatctggacaagttgaaggtgacgactaacgcagggttcaaacgcttgataccatcttgggttaggtacaagtccttcggactctgtcctgattcgatgaggttgatgaatttggtctttgtcttctctttagcctccgcaaccctcttcacctcactcgtggtggaggttctgggcgtgtttttaagggtctcctggtacaactgattccagatatcgtctacagggttaaagttgaagggttgtaatctgacgatccagcgatcggtgaagagacggaaaaataatgtctgtatatccaacttcttttcttcatcgtcaatattgttgacatagtcttctatacggatatgaccattcacaaggatgttctgcacgatttctgcagaatcctctccatagtgtgttgtgacgtggctaatgatgtctccagagtgtaagaacactagaatgccagtttcgttgaatgagtagaaaacctgtttggatccactctctcgccagtagaagatacaattcatctgaatcaatgatacaagggctgatttcacctttttcacagggatttttgttctgtggctgatgtctgtagccgtcaatcggccataggaaatcaaacaggagatgatgagtgcggctacatcgcccaaatggttgcgggcgattgaagtgtacaagtacgacttcggtgattgtgtcttggatgcctcaggaaggtcgccgatgtccatttcacgttgtagagcaactagtggatttgtttgctggagaaaacagagctattttggttgtgaaaagtaagtgaagatggatctgaaaaaattgttatgtatgagtcatgtgattacaaacatgtgactaagataataatgatactactgaaactggtagttgcgtagctcgagaggtactaaagctctgcaaaaaaagagcgcaggttcccttttggtgtgacattgttgtgcaagtctttcatatgttattcttttcacttcagtaaaattgtggtcttcttctttccttagcccgttcctgctgtgcatttttcagtcgcatattttctactcgatttcaaacccaaaatcaactctaattagtaccgtttgactatctgcagtcgaaatgttaggttgattctacaaatggttactgcacgattaatgttagcaaaatgaaggtaagaatagaatatagaagggtaaatgaagaggaagaatagaaaactaatatgaagcaataagtcaattctcttgtggttgaggtaaaagaaaaaaggaaccatgtgagaaaaggagtctaggagtctaaatactcagtggaagttagtttatagtataaaaaaagtttacatacaggcccacctttatcaatgttaaccaatttttcatttctccatccgcaaggacaacctcttctaatcattccaaaactcatatttacgccccaaaccaacatgtcgagtgtcaagaaggcactcaagttggctaaaagcgcaatcgatctgggtgatgcggaattggcccacgagcacattcaggatgcgctcagaactgatcctgagtcctactttgcctatgtatttctcggaaaggcataccagttagaaaatgatatagccaatgccaataaagctttcgaaagagcgactcagttggagccagagaatatgttggcttggaggggatatttgcagagcgttaaaagcgagtctgattatgcgctttttttcaaggttgtcactcaattgatacgattacaagtagatcaaggtttttctatagcagaaaccataaaggatatccgaaactacttggctgtgcaaaagtacaagaagaacccagttctccatgaaatgtatctccggcaattaaaaccgggagctgagctagccgaacttgttggttcagctcttggaaatcctgttgataatcttcgagacttgatcaagttgacagccaagaagttggaagttgaggtaacgcacaaatcggcaaaagaaagagtgaagtatggtaggagattgacagcaaaccagcagctcaagatggacaacttccaatgggccatctataagaatacagacttagagtcgttgtacgaaatgtatctcaatataggcacaaatgacgaccagagaagaatctttgaggatgatttgttgaatttcaggtaccaacttctcaaagtttgccctgagaagaaagaattgttgcacaagatccaggagatggtagatggcatggcgttggtgaggacgtcgagtcgtgtttgctggaacttatattttgaatggctcgatatccaaaacatagctgatcttcatgaaagaaatgtcatatattacttaaatcacttccctggtgatggattagggatcgtactctatgcctacgcattaagtgacatatcgcctttcaacaagaatgtaatcatcaatagtgtcaaaagtcacgattcattcacctcgaccaaagagcagaagactagtaaacgtaaaaagagatacgaagccgcgacagaagtggaatcaaatacaaaaccaggcaaagatagagatccttatgacattagtcaattctacctatcttcagaggaagtgatatctttcatgttaaaaggctatgactgttccaaacagtcagtgttggccatcagaatcattattgaattttatattcgttcccgaaactttccagaagcaactaagaagtgcaaagagggtattcgtcttcttgctgatttacagagaagctttggtatcaatttgaagaattccagagaacatatcttgtcctctttagctgacatatacacccagcaagatactccaaagaacttcaacaaagcccttgaattgtacaacaaaatcttggattttagtcctgatagcgttaatgccagagttggcaagggtttgattttgattgagaacggcaaatacgctgaatcaaagatgttgttagaaggcgtagttcagaaacaccaagacaatgtcgtggctcaggtcgaatactattggtgtctgatcttgctaaatgaccacgaatctggaagaaaaggcttgtattctgcgttggaaaagatcaatggagtagataatctaagtaaagaaaggaggtctgttatccgatggagaatagctcaaagttactacgttgaagacagcctgaacgctcataatctttcaaatgcttattctgtcttgatagaggctcttaaggactctcgatcatatgccccaatatacactttgttgggaatcttgtttaaggactactattccgattctgctcgtgcccaaagatgtttttacaaagcatttgagttggactacggggaaactacggctgccaagtatatcgtagaagaattatcttctaaggatgagtggggtctagctcaaaccatctgtgaaagaatcgttaactctgaggatgccatggaactgattctgaaatctgctaaagataacaaggatagatcctggccatatagagtattaggttactgtggtcttaataggcaaagcgattatggcaccgttgaatggttacagaatgcattgcggattgattcgacggactacgaatgttggactgctttgggcgaagcgtaccttaactgtggacgacttgaagctgctgtcaaagtcttgcagttttcgttgtctctcaatgaaggggcctgggaaaccaagtacttgttgggtattgctcattgttcaatctttgaatttgatgaaggaatcaagcacttagtagaagctttggaatataaccctggtcaagaatgtatcttgaatgctatctatgaatcttatttggaaaatacccattacttattgtttaatggctttctgagaagagcgattctgtccaattttgaaactatcaaatatcttcaattgctggtaatgcaaaataaagattcgcaaagcttatggaaagcattggcagaatgctttcaattctacttgacggtaagagaaaagataggttcattcccaatagacttcatggagtccttatttggaacagtcaattttgataccccaactaatgatgttcttgccaagcttgaagataaggaatcctctaacttatcctacaacgtctccttgttcaattctggaaaacgggaggaggcaatttgtaactttatgatcatgagctccaaagcagcagttcaattcttgaccaataagccgaatcgttctgtcagtgcggctgcttactacaaccttggattatcatactctgaagctttccaattgacggatatcgctgcttatagagacaacgcaattattgttctcaagaaagcaattcaattggaagatacgaacgcttctttctggacagctttgggtagtgtgtatgttacatccaatgtcagaatctcccaacattgttttatcatggcctgtgaaattgatggaagggatgttattgtttggaccaacttggctgctttgtacttgtatgtgggcgattatgaattggcaaatgaatgtttcttgagagcgcaggcagcagaaccactagaaacaaatccattgttgggtcaagctttggcagctgatgctatgggtgacgagagcttggctgccaaaatcttcagccatgctttctctacctctagaggaaggtcaccgttggctttggttttgtatggtttgtctgttttgcaaaggagaattgacgatatagatcccaccgattatgctgcctcactagagtttagtcttgccaacgaagcactattgacttacttgaagtatgctccagatgacgtgtttgctttagaagctgcagctaccatcgctgaaagatgtaaaagttacgatgttgctgttacggttggtgaacgcttatgtacaatccttgaagctaagtacgaggaaactgaagatgaacagacattggtcaaatacgcttcttccaagtcccagttggccagactctatctaggaatgcttgaataccagaaagcacttgattgtgctgaaaatgctatcgagttgattggagatctgactgaggacgctgaattgagcaagattgaattatcatcgagaattgttcttggattgagttggttctttaatgatgaattcgagctagctcttaaagagcttaggtctatactttccgaccacggtaacaccagaagcattgctatacttgtagcacaaatactctacgcctacggcagtgaagagacaaagctggcagcattggaccagctcttttcgtatattgaagagaatggttcttcgcttgcagtagtattgacgttgggagccatgtgcgtgggcgacaatatcgaggagtaccttttaccagtcaaggaggaattggttggtattctgttggaagatgttatccgcgatacacatagagacattcctcgattgatcagcgaaatcaacaagcgaatcgacggtgtttcaggcaacaacgactatctttggcagaggaatgccgttttgttcccatctgaatacgaagtgtggaagaaactcaatagtactatggctgtcagtgtggctgcgttagaaaagtccaaggtcagtgcttcccaggctagtgaagcacatcttttgggtggctctttgcgtgaacttcagagaagtatgatcctagctccaaatctggctattgcttctcaagctttccagaagatgtttgcctagcatacataaattagcatataaagaataataatcatataaagtatagacatggagaacaggtcttagtaaccgtagtaccaattagatacgttgctcgtagcagagaatactgtcggaccacttgtatgtgatgactgaacataaaattgaaagttcaagaataacttatacatgacgaccggctttttaataattgaaaatagagttcagaaaagaaaagttgcagccatttttcgacaggatgcatagaagctaccccatatttaggactgcaatgcacggaagatatcacacccaatcgtgactacgtcattggctccctacaactgcaacagtaaacagagcggacatgtgacagttgcagactctcccatgccgaaaggctcggaagacgcttacgggcgtcattcgaatgtccctcttggctggtgattgcaaccggttccgctcctgtagaaaggaccaagggtctggaggggaagccgagggaaacgtcaccctcgaatctggactaaagggtctaagagcaccgttagagtgataatagaagcaaaaatagttccgatacagttggagcagtttgacggtggtgacagagaggaactgtgaattcgcaattatcggcgcaaccattgtcacgtagtcacgaaccctcccctgctcctcgctaccagcatctcgttgctgcgaaccctcgtgccagatctcacactctcgctggctacactctttctcgagcaatttcattattacccaaaccattcccgacccgtcatacactacttggtgaccccaccgtgacgatttgggtggtgaaatttagccgtctgaatccaggttgtccgtttgatcactcgttaccagtctcgatcttgttggctactgagcccatttcctgattggctcttggtgaatgttgccaccacttgggttgcttcttttgatcatttccgctgttcctatttgctacgctctgatcacacacattcattctcgagcctgtcaaggttatctataccggttctatggccccgataatgacctcacccaaaaagataaagcggtgtgcaggctgctgatcccatacctaagcattctattactcacaatctgtgtagataatatatacacctgattttgtgcccgttggaggtgtggtaaatgtatctctttcttctgccagctcctcctgtttgacacctgtcacagtcttgttataatcgtcgttattgctatcgtttagcagtggctctcatcatatataaacggcaccaactcctgctttcccagtcccccatcccagtcttgttctcactcccccatacaattcgtgctgtgatcccgtgacttcacagttatcactataatcagttaccaagacttcctccattgccaccggctggctcctcctttcgcctgtgttacgtgtctcgtctgtctacatccacctctcccgcttgcgcagtagtattgttatcgtcatagtggccttggctgtatcagacgttaacctccttcttgtgtttgttaccacacgcgagaatatccaaatccattgtggcacggtaaacagataaccatcacgtccaccagacaccagttcgtgaagaatagcctacaaacgagaggccatacatctcacaaataaccgcaactcacatcgtttcattactctggtgatcgatctgttttgagactatctagtaggtgtatcgtatcttgtatctttcgtactgtcctgtccccatcacattatcagatatttgtatcattatcaatatcacttcccgtccacatttaatccatatgagcgagatcacgttcctctagtctcgcagacacctacaatatttataaacttctctaatattccttaattctctcacttcaaccagcatagcttcacatagacagcaaccatggcttcccaagatatcctgtaccagtacaaactgcagcaggagcattatcccaacgaaaagatctcagattcatatgttcagaagcaaaactccaagctcactcaagttatccagcaatgtttcagcaaggccgtcaagataatcatccaatcacgaacggttcctccggcagctgcatcgccattgctcaatccagcacttcacgatgattctgccagcggaaacaaaatcaatcgttggttcaatttgcatatccagaactcccaggatcttcccaaagacgatctcaagctctggaagtccaaccacttgcaaagtatgcctcccatgatcatcgagacgtatcttgacttgaggcaattgacctcaagtcaaaccatagttttgaatgatgataacggtaacccgtgggcagtagccaagagcggaggcaagaagcaggaagtggttttagaaagatggttgattgaattcgaccacacagatgctctgggctcgatagtagacgaattacctttgatctacaagcaggccattattttgttccgcagtatctatggttttgctcgtctaatgcctgctttcaagttgaaaaagagactcttgatcaacaaatcaagcaccaagttaaacaaattgactataggcaacaaaattttggatggaaaacagcccatcagctctaagggaagaattggcttatccaagacgataatcccacgtcaaatgctcactactgactctcatatgagtcaaaagcatttccagcccattcaaaccagcttagggactttaaagatatccatagcctatagaaaccactgcgatttctgtattcacgacaacgaagaggtgctttctactcatttcataagcatggattcaactcccttgactgaatcgggacatggccatactaaggctaagtttgatattgaccatatcgatgaaattgatgctagtatcaattccaaagaagaccgcgacaagtccccttcaatagaaaatatggaatatcccgaggccaaagattccgtctataaacgtctctcaatagccagcaatacttcaatgtctgtctcaccttgttcttcgggacatcctgctttgagagagggttctcctacgaagaggggaacacctccaacgggtcaatccaagccagcgattcaaccattcaaggttggctctattagtaattctcctcctccagcatcacatacgccaaatagcggctatggaggatcgttggaaaggcggatttctattacaagcaacagatcgacttcaaatgcttctttgtttgcaatgttgagaaaccctagaagtagtacatcgtcaacacataccacttctaatatcccgatagcaccgagctcgtcgagtaatagcactaatgccacgaacatgaataacatgtcgtatcctcgctctatttcttcttcgcacggttcaaacatgcaacatgacgatagcatgttttcaaatccagacagtaccaccaatacgccgcgcttttcgtcttcgtttggctcgcgtgccagcagaaggtactccaatactagtgtaagacaaagtactcctgtagctgctagcacattaactggtggaagtgtttctggcatgaatgccggaggttcaagtgtagctgcatccggtccagatggatctattcttggaacaagtactgtatccgtatcttcctcaattgagcccttgagtggactttatattgatgatgatatcagtgagtttgttcgtctgattgatagtaaagcagatcttcgtttctctaattcgtataccgctcataacagcggtgaacccaagaacaatatgggttctccaagtggaggtgacgctttaaacaagttccagatgatgaagagtcaccaccaacaattaggtgacagcgtaaatgccagcttaattttgcagcataacaatgcagtcagtggttctggcagtggatttggcgtaagcaattccagacactccagcacaagtcgtaagagctcccattctatacgttcgccttctccttcgatgtctgggctttatgatgtagttcctggcagctatgggagatctgagagaaggtcttcttcgggagctggtgttcctggtcagctttcattaccttctggtggtggtttggctgcacattctccgtcggccacagaacctacttctgctgcgacgataacgccgcgcgagtatgtagctatagcaaccggcgagatcgacaagaatagaagatcgtcgtctggagaagaagaaaccagaacgaattttaacttttccaatgcatcatttcttcgatcggcaagcaagctttctgcaacccctgtcacttctacaactacagcgcatgctacaatccatctgggttcggatgtgagaggtggagatgcaacgggagtgactggtatggctacttcaccttctttataccaacgtacgaaggttggatcgtctattcactatgaaaatgtgtttgaagatgacgacgacgacgagatggttatgaaaaaaccagtcgtcacctcttccggcagagatgaagaacagctacaacacaaacaaatgaaagtggtaagtatagaaaaagatgcaggtgcaaatagtggccatagctccagagccgacagaagtatcgataccgaacttcaccatcatcaggcgcctcagccgggatctcaggaagatttcgacgacgatgacttgctatttactatgagcgatatgaaccttaccaaaagttcatagtgttaaaatagaaaagcacatgatgttaccattttgatagcgaactgtaggaaataagagtacaatcaacagtagaattgagagtactcatacgagcaataaaataaataaccatagttactgacacaaatcctgtagattatctcttgccaattataccctattaggaaagctgtttttccatacatgtacatgttaccgcaagtcgtgagtagttgtacttttgttgcaggaaattttggacgtgcacaacagacaagttggaaaagatgttcaactatacgcgcagatctgcagctgaaaatccactgagatctcacacttccatgtgactgtctcgagctgaagatctgaacttgtgagattgttcagcaagtgtcaagattgtccaattagacaggattcacaaaatcgcgtatgatccacataatcgagtggtactattgttttcaatggtgaaattgattttggtaattagtgctctcgtaaaaaaaaagaatgctaatttttcccaggcggtgtagctcctgccggtgcatgcatgcagcaacgatctggcccattcaggacagaaaatgtcgagatgacatgtacgtgactaaattttagctttaaagttttttcgctgcggaagtgaaggctggtttaagcaaacaattagcccaaactgggcgggtaatagtttgagctaaccgctgctggcaagtagggttcaaatgaccatacatcaaatttacgttgatgaatttcatattcagttcaccgtttgatacccgatcccgcttaccagcaatatttttacacaatggctatgtcacaaaatcaagtgaaggtatttttaaggtttgatatatcctgcataaacggtttaaccagctttcattcttgttgcagttacaatcaggggggaatcttgcgaagacctcccatgtgttgatcggcactttctggcggttaaggtttgaatctgagcttccattttattaccgccgttatcttagacaacaatatgttaccggatacgggaaaatagaagagattcaggctaaatagaaaataactacgaagctatcgcgctttgttttataaattaagtattattagtaattagtagccactatggataaaattaggtgtggagctatctaaaggtaatcgtgaaatgaacatgctctcgattttttgacattggatacatataaaaaccaatgctgtttcatcgtaggtgcatacaatcggctcggtttaaattccggacaattgcaatgacaatgcaccacaattaattccgggcgattagtggtcagcgtcttggccagggttacaggtttcgtagttcaaaaccttcaagatcttccagatagcaaaggcaatgacggaacccaagattgggccaacccagtaaatccagtggtagtctgggaaggacttagaggcaacagctggaccgaaagatctagcagggttcaaaccagcaccggtgtagaagacacagatcaagtgacccaagaaaagagcaacaccaatgacaaatggagccatgaatgtagccttgtgcttttcaacggccaagagcaagacagtcaaacacaagatagcagtaccgaaggcttcaatgaatacacctctggatctggagcatccaccaccaagagcgttagcaaaggcaattgggcctggggtcatagcagaagcagcaccggcagcggccataccagcgatcatttgagcaatcatcatgatggcacctctcacaggaggaacagcttgggccaataccaatgttaaggtgacagctgggttcaagttaccaccagaaattctgtagaacatgaatacagccatcatgacaccaaaaccgaaaccgaaagagatcatgatcaattgttgaggttcagatccaacttcaggaatgttagggtcttggttggcaatttgggcgatcataaaagcagtccacaagaagatgaaggtaccgaagaattcaccaaggaatgcaatcaaatggttcttcaatggagaagcagtgatagtggcgtccaactttgggttgtaggtctgttgggcctcttggtcaaaggtttcgttttcagtggtcatagcgaatgtgtgatttgcttaaataaataatgaataaaatgcaaagaattgatgcttaatgaaatttgtaaacaagtcaaacttggaagacttcaataatcacccaagtccagagaaaagtctaaggtttatatagtgctagcatcaaccaaaaaaaaaaaaatggaaagaaaaaattaaaaccccaatgctaaaaaatattacttcgaattattacatcaaagaaaatttttatatattccctttttgttcgtacttgtattcttctctcacacagatgggcgtttctttttccgacctatttcatcctatttattgacagtcactggaggaacggatggttaaatgcacggttttaaaactggttcatatattctaaatatagagttgccttgttaagtcggccaaagcgcaaatttgttcacttctcaaaaaaaatttccttctcttggctctcatctcaaacataaaaagctgtttcagatggaattggcttgcttatactcgctttgggtgaacatgacgtggtccgaggcaaaatctataaagtcgttcgacaatagtggctacgcccctaactttcacattcatttgaggcacctccatgttttaatggtgagcaattgagatgagcaaagacggggcagtacacaagaaaagacgctgactccccctgaatgatcaaaatgttggaagttgatgcaccgaatttaaatgatcatatcctgagataaagatccacctttgcactctaaaaaagctaaaagaagctttcttaccgtattgcttcgcgtgtaaatttatgtatgtctattgtcctagttccatcttaatttccgtcggagagcccctggtttctgcatcctggattctgcattacccgaggtcgtgaccaacttataccagctaaaatttagtaatggctttggtctcagctgaaaattggcgaaatttcatttcatcccttcttggttggcgagtgtaaccttgcacccacgaaaattgagcatcgggaataatactagcaacagttttcgtgtttctttcgagaattcttccacatgctgtggagtaccaacacttgcatggagtaaatcgcgttccgtttcctttatttaattactctgaaacatctgtactctccacctgacaaacagaacgtccggaaatgtgcacttactcaccacactacatattatcttacacaatatagtcttcttggagaagaaaacttttactgagccggccagcggtgcatgtatttttctgggtgctgatcgtctttaagcccatactaataaactctatttactctcaacctgtttccatacatgttcttgagttctcttacataagtacacatcagggaatgggctcactaaggaactctggcctaggacaggttctcatgcgcaaattcaccaaccgcacccgttctacgtggctaaaactataaatagtatctgttagccaattgactggcggtatgggttgataatcgttggcacattcctaaattttaacactagtcatgattgccacatgacgtcactttcgttctgctttttgtatggaaatgaagtaaaagttttcgctgccgataaaactattcggaggtttatgagaactgacatcggcccagtcgcctagctgcatataacacaaaatagtattcgcttaaaattctagatctgaaattgctcctaacgggtaaggttagatgcatgtgcatttgtgcacgtgccgtgagtgtcagatgatacacagcacgttatctcgtcatttttcaatttgtttggatctcgatactgtatattgaatccttaagtcttttaggcttaatatttaagctggctacgtcgaagttgtttctactgaaatcccttgcattaacagcttgctatgaaagctcagatttgactcacttcctaggaggcttctaggttccttaggaaattctgttagctaaatatatagacaaattctcgaggcgagaatgtgaaaaattttcacgagattccaactgcccaaaatgggatcaacttggtcgggaaatgtacatctagacccataccaagtaggaccaaccatcgcagttacatcatatggctaagccttcaacttcgttaaacattcttgaagttgatggaatataatgtaggatcaatgtcgtaccacagcgacattatacgacatttagattgaatttccaacactcccctaaagctctgataggttctcttctagagctttcttctggaattttttattatggatacttttgatttggacttgtctcttcgtagttctcaagtcacgattgtacatgttttcgtgtgtcactatgtcggcatcaggcatgttaaatagatatttccgtagtcgatcgaaatcggggaaagtgagagctttagtaaatatgtctgcaacattttctttggtttgaatgtaatagacatggtatctgttgtgatggattccgtctcgaatgtatttgatcttgatgtcaggatgacgtttggtatgagataagtcattgtaacagtttgcgattacggcctgattatcttgaagtaacataacttctccaacatcaaaggtaagactctttatccgagtagttatcttctcggttagctttgcagccgcttgcaatgaaactgtttcacaatctcttgtactgtcagttattaaactctgtttcttagcagaccagtctaccaaatttccattgacgtacaatgcgatcccagttatcagttttctatccttgtctggagcaaatgatgcatccgaataggttcgtatcgagaacttatcattcacatcaggtattctgccttttctatattccaaaggcatgtgcgtattacttctcaagtatcttaacacatagtacatattgttgtaatcatccacgtctgggttatgggattttgaaccaaggacactcactgcgtatgatatgtccggccttgtgttgttgctagcccacaacaattgtccaacggcactttgatagagtttctttgttttctcattaagtaattcggcctctggttcctcatgcatcccgtcgacgattttagtattctccaagtacgattttttccttaccataggagttctcttgggttggtcgtccatgatattgcatttgtttagaagatcttctaagaacttagtttgatataatgagtatcctccttcaattcttttaaattcgatacccaagaactcagtgacttccccaaaatatttgaggtcgaactcctgtcttaattctagcttaaattcttgcaacatcagttccttggatgcgaccatgaatagatcgtcaacatataatgctattatgattattccttctttattccgtttgtaaaatacactttctgtagtcgattctgcgaatgacaaactttctagtgttcgttttattgtttcgtgccagtgaaaccccagttgctttagaccatataaagctttattgagcttccagcaatggccatctttagcttcgtatcccgggggaggtttcacataaatattctcggcaagtgtagcgtttaaataagcagcttcaatgtcaagatgatgcatctccatacttaattctgtcgcaatggctgccaataatctgatggttgttagatccacaactggagacgatacctttgtgcaatcgaaatcgatactgtccttctgtctatatccttgagctacacatcgtgatttgtattgcgcatttttcaaatcattctgcttgaaggtgtgtacccatctggttggaataggctttcttcctttgggtattttgacaacagtgtagacattgtttttctcaaacttcgatatttcgttgtccattgattttatccagtctgaattcttgtaatcaattttattgataattgcgtttaaatatcttttcggaggtcttgacattctgcctgattttaattgaatgacatactggggatctatctcctcagtggcgccggtcgcctcagtagtcgcttctacttcctcttcaatttcacgtttagatttcagaaaatctgggtgtactttacgccttttgttaggcttatttttgttggtaggggaattcgctgatataacacgattaggtatggtgttatacgcgcgtctgtcgtttgtgatctcacccctgtcgacatgttggggtttaacgagatcattgttcgactcagggatgttggggatctcctctgcaacatatgggtctggcaacacagtagctgcggaggcattcgcgttctcggcttggctttcttctgcttgcttgtttatgtctgtagaacttgtagagggtgtctctttattgtggttgtctacatgcttagtacgaggggaatgcttgagcccgtctaagtctttatctgacacaggactagtggaggcgtacgtgtcactattctcatcactatcgtcgtgcgtttgcttattggtgagctccttatcactcaatgagtcttgcggcgtatgttggtcagtggagtacccgacatattcatcgcctctgtccaatcgttggacgtccgtagcagttgtactagtttgtgctacgtgcttggaagaggtacctttttctctgtccaagactttgtgggtgtcaggttcggtaggtgaactgtctacactggaaatacctgtatgcttagtgtaaggggaattcatgtccttatttaagtctctgaagtgatcgttaggcgaagggaaatgtgcgtccttgtctaattcacttgtatctttcgcgggattagggggatggattgcccttgtgcccgaggcggtagtggtgtccgcgtgttctttgacagattgggacacctgagttatgttagtgacttcggtccctgcaatcagttctttcgatgttgatgattgtgggagctcagtgtcctcaatggtctttgttccactataatcttgctcgttgttgatgtttttgtctatctcagaatagttgtcactatcttcttccatattttccgttgcactattatagtctgcactgtcatttccccagtagtccatgctttccaggtcagtgtctgtaagtgcttcatctgctcccctgattggctgaattgcggtgccctgtaattcagtcaatttactttgaatctcttttgctatgtctggatgtttggactgcaagtattcgatctgggattgaggatcagagatgtcaggaatgtcttgatcaacatcacttgtcccagtgtttaggaaatggtcgagatcagtcgagtctagaatttcttccgtttggggtatggtaagtgggttttccgaaagacatgcgtttatgtaggttttaaggtagctatgaccgttaacgaatcgtgcgttagcagtgtttacttcgtgatagtccggtgattgtatgagaatcttatatgtgttatgatcagtaccatatccgatgaaggatccgtaaactgtgctagggtattccttcagtggggatatccggtatcttgccaattgcaaatcattctctactttcacgtgtacgtcttgaccgaaaggcttataattaaattgtctttgagttcgctcaaatacttcccgtggtgactgaccttctaatcctactttgggggtgttattcaagacggctgtaatatagtttaccatttgaggtaatagaactaatattgatgagccaatatctggaaattgtaatgttaatttcttaatctgatttatgatagttcggttctgcctttctgccgtgccgttgatagctggtaggtaagccggggtaacatctttttctataccgagtttagatagcatatttgcacttggaaattcaggggcattgtcagttctaaggtgaccgattctctcccctggaaatttgttgttgagcaattgtaattcagtatatatccttgtggtaacagctttagtgtctgtcactattgttctaaggtacttcgagtaaccatctgtgatcgaagttatatattgtttctttccaccaaagtgaaacggacccatcatgtcaagatgtaatcgttcaagtcggcgaataggtgtgggtccatcattattgtgtgatgctgctatggtgttaacgctgagacatatctggcaatttgtaattcgttcgacatcgttcctcgttggttttgcctttatcctaccattttgataaagtgccatcatgctctttagagccatgtggttagaaccaatgtgaaagttccaaaatgatgattgtttgtttacatcgaattgtggtgggtcgatattgtgaatcgtttgaacttgactcaacaactgggtaccggtgtagttgtcggtcggttttagatcaattttgcccatgtatacattgtcagcattaagcatgccagcgatgatttctatttttccattcttctgtccgatatatgcatatttgtcatcgaatcgacagtagaagtcggtatgcttagagatctgagatacgctaatgatgttgtgcggaagttctttaatgactctgacgtctttaagtgttatgccaaagtcaccgtcagataatgttaatgtgcccatgtgtgttgctataatgatgcttgagtccggtaattcaaatctgctttcttcttctgtcaaattttcagttacattcgttagtaatcgagcgtcatttacaatggaccatgatgcaccagagtcgtataagatgtctcccgcttttgtgccagatacgattttgtttaatcgttgtatatttaatggtatattgtctctacgttctggtccgttagagactagaccttgaccttattgtccgtggcgtttggcaccggaggttttgctcttgaatcccagcttattaccatcgtgtgattcacctgtggtgtgggattttgcaaagtttcctctatttccattggatttggtcttttctctctcttgggcgtttttaatcctttcgcttatcaagctttcgattgttcttttgtccagagagtctggtggctcgtagtcgtgatgatttctcatgcgctgaataacgtcatcaattgttggtgttttaccatcctttttgtgttcctgaaagaaccaagcaagagatttataaaacatgttgcgtgtttcaacttcgtttaggtacctatcaaatacaatgatgtaatatagtttcatcttgcacaagaaatctaggatttcttcgttggtgccttcaacccattgttttatgtgcagaaggccatcgacagctctgtcggtatccgttctaaaatctccagtgtacctaaggtaagtcaatacctgtccaattctatgtggaaggttctccatcttgtaagtctttacaaagatgtacatagtctttaaatctgtttcgtaattcacttcatctatctcagagaatgccttttcattaatatcaattattctggatatcaattcatcggacaatctgtgtatgaatgtttccaattccttcccacgccatgggatgttcttaatattgaagtctttagaatcatgtcctaagtcttcatcccatattttctgtaagccaccgtatcttcggaagagttttaagaaggctttttcccatttggtaatagcgtcaatatttctcgcaagcggaacaattcctttgaaggctgttgctgctagctctgaatctttcttcgcatccttccttatttcttcattccgatcctccagtttgtttatctggggtggaggtacgccagaggagctttgagctttcatagcttccatcaacgcgtcatacttggcgctttgaaccaatagctcttgcttgaactcatctttgagtttctgcaattgcttcccaacttcgctgttagggtcgataaagttatcttctttagccatttttaacttaagattctaacgcgaattttgacttctaatctgtttggatctcgatactgtatattgaatccttaagtcttttaggcttaatatttaagctggctacgtcgaagttgtttctactgaaatcccttgcattaacagcttgctatgaaagctcagatttgactcacttcctaggaggcttctaggttccttaggaaattctgttagctaaatatatagacaaattctcgaggcgagaatgtgaaaaattttcacgagattccaactgcccaaaatgggatcaacttggtcgggaaatgtacatctagacccataccaagtaggaccaaccatcgcagttacatcatatggctaagccttcaacttcgttaaacattcttgaagttgatggaatataatgtaggatcaatgtcgtaccacagcgacattatacgacatttagattgaatttccaacacaattgctgcattagtcacgtgattactctcaccatatcaagcaatggtttatacatttttcagatcttatcaacatcttctcattgaggtatccatacttatcttgtacatataattgcatcatggggaacagcaatttcccatcgcctttcaaggtgaaatccggttccaattccaaggaggaaaaagccactcctagagccaattatagcactacgttcaacagtagccatctttatagcaactccagagtgatcctgaaactggctggcatcggcaataaaagtattgatgttggtgccgaaagcagttcgaatgatatactagactggatcactgatgttgatactcgattcaagcacttgatgcgacagcagaaattagagctgcaattgttgaatgttcaagaccaacaagatcaattgagattgaagtacaaaaataaaatttttgacgatacttttgaaaagttgggagcaatacttgaaaagcagcatagtgaatcggatcaagaagaacatgaaatagaaagagtgaaaaagagaattgaaaaagaagaaacagaggattatgatgatcaatatgaggaagcagaagatgatgatgaagaggaaaatgaagaagatggagtagaagatggagaaggtgatctcatagaaattttatcatcagagcaggaagaagaagtatctgaagatgagtctgaatctgaagatgaagatgaagatgaagaacatcatgttgaaaaggaagaagaacctgaggctcgtcctaatataaatctcacatacccaaacacacaatataccaatagtggcatccaattgccttcacagaagaccagcataccatatagtatccatcatggaagacctcgattgtcagattcttccctatggtacagtcaagttcgcgaagaaaaggatgatgatgggccggaagatgaggaccaagatgaagaagacgaagatgaagaagaagacgaagatgaagaagaagaagaagaagaagaagaagaagaggaagacgaagatgtagaagaagatgatgatgaagaagaattgaatgacgaagaattgaatgacgaagaattgaatgatgaagatgttgaagaagagattgaagaagagattgaatatagcgaggaggagggcgatcatcgtatttttaatagacatccggagttggattcttccttgcaacatactcaaggcagtagttttgaacagactcaacgagatcccgaagatgaagatgattctattattgttttagattctgagtccgatcaggacgaagaggaggaggaagaagaggtgaatgatccacttcgatctttatcttactcccatgcaaatcatcaagatcttcatagaaatgaagtagaaaaaagtgaggtatctgaagaagaatatgctcgcgcatatgaagaaaatggaaaggaagacgaaggtgaatacgaagatgaagacgaagacgaacatgaagacgaagacgaaaatggaagtgaaagtagtaaagacgacgaagttgatgatgaaaatagtaatgatctggaaatgggtgttagtaatcaagaaggtaagactcaagaaagccaagaacaggcttttgtggatttttcttctgtgtatgatccttcaagtaacttctttgggcaccaagatctacttcagcttgctaatactgttttacagaacgcagattcagagtccgtttctattggaaattcccgaatagatccagagaatgaaacttttcctttgacttatgaagaacggtctcgtatggcaggttacaatgctgacattgaagctacagacaataatacggcaacaaacgtgccaacaaaggatgaagaagaatacgatctgaacagccacgtcaaagctgaagatatcgctcccattcctaactcattttatgctgaagaatttgaaactgctcatgatatgaaattggaggaggccgatgaaaacaattcagatggatctttggctgatgaagaaagcgatgtaaacagattgaaacaagaattgaaatttgaacataaagtccaagaagatgtacgtactaagccgaatggctctactgagttagtgaaccaaactcttcaacttgaacaaaagcatgaacggcaaggaaaacaagattgtcaagaaattgagacggctgtaaaatcacattcagaaattgaaagtgagagtcagagtgaaagtgattcagaactgtatgcatccgttcctttcttcaagactatagaagaagaggaaccagaagtagttttgcaacagcttcgtgaaactgaaagaaagtttcacatcactttgaattcagttgctgatttagaagaggaattagggataaggtcttctccatttaattctgctactccttctagaaacatatcagttgaaccagttatttccgaacgtgcaacaaatgaaagtaagtcgcgtgtagatgaggtgatcgtagacggggacggtgtcatagaagaagagggtttatgtcggcttgaaattcctaatgagaaaaccgagatggaagagctagagaagatagagcgtccagtacttgaagagcttgctactgaggaagaagattatacggagtctgattctagatttgaattcctgggagttgaagcagttgaagatggaaatgatgaagtcgtggcttcgcatgaaatagtctcaaaagaagaaacatcagcaggaacaacaaaagttgaagaaattgaaattgctttggtgaatgaggaatatatggaagaagcgtctaagacgacagcagagttggtacaatctggtattgatctgactattgaattgaaaacacattcggttgaagatatcatagaagaaaatgaaggatctgtgattgaagataatagtgaatctcacgatcagtttcaaaatattgaaacaggcttacctattgacaatcaggtaaactcagctgtttacgaagggcaaggtgtggataagacatcagaacaacagttgtcgtcaattgaaggtcaagatcacatggaaaatgaagagttaccagcagaaagagaaaatattgaagttcctcatttggattcactcattactgacgaccaagatcaaagtgcagaagtttcaaattatacaattataactgaaacgcaagatcagattcctgaagttcctaatttggatacaattgttagtcaaactcaagaccaaagtattgaagatgataatgctgagttgaattctacaattttgcctgatgttcttcctcagatttcagttgaaatggcagacgaagtgaactctagtgtcccagaagaagttaatagcatgaaagatctatcagaaacaagactccagtctaatgagcctatacagactgatgttaaggagaacgttataaatgctgattcagaaggtgatgctgttcctttgtcaaaatctaatgctgattattccgaaattgaaattccaattttggatgcttttgttagtgaaacaaatgaccaaacggctgatgaaatcacaataccagatacttcgacaattgaccatgaacctgatgaacggccaattccgccttatcttgatagtattgatgtttccaataatgatattctgcgcgattctatttctgtggtagaagatgctaatgatactgttacaatcaaaatgccatctcttgagcaaataaaagaagatagcgaacttgtctttgaagagtcgggtattgaatctactgaattagggaatacttacacaactgacattcttgagaatccacttcaagaaacaagcattatgctgaataatgataaaaatgaagatgttgaaagcattcccattcaggctcgctcacaagatggtgatggtaatttcgccgaatctgttgttgttgaagagattgaagaacaggatgaaaatattatcactgagattaaccaaaatgtatcgattgaattgttcgagggagaatccattcttcgacctacgggagtcattgaacctaaagcagaatcagctgacgttgtggatcatattgtcaattttgaccatgttaatcatatcttagtccctgaggaacctgaggagatagtttctcctcttttgactcctgaagaagtggaagatgtcgttcctattataccaaatgaaattatcgaaccagagtcgccagagccttcaggattgaatatagcagaacaagaagtagacatcgaagttggcggagaagatattgattttccaacttccattatcattccttcttctaggtctgcgtcaccagcagtatcagttcagtatccagtggatatgaaggtagaagaaattgatcctaatcaagataccaaagttgaagaccccaaagccattaatagcgattcaccatcaagtagaaagcgaaagctggaagtggacggaggtagctttgccaagaaactcaagagtaaaactctgatattttcgaagtggttcaagagaactgaagttgatgaacatgtcgaaccagttcaatttgttgtggtacctgttttagatccagttgaagatgatgaaactgaagacgaagttgaaaatgagaatgtagctgataacttcgaacttagtaaaaatcaactagatgaagtctttgtgaaaggaatgaatcaaatagaaaaggaggcatttgtccaagaagtggaacaatcacaatttcaacaaagtgaatacaagaagatgtcagattcagaagttgaacttccccaagatgtaaaggaccattctgaagaaccgcttggatcacaggaacttgagctggcttttgttagtcattccgatgttgagagaggagaagaaattgaaaggtactctgaagtcgttgtaggtgaagatatgaatactggtgataaggcgattgatgaaggactaagtgttgatgaagtggttgatgaagtggttgatgaagtggttgatgatgaagtggttgaagaagaggatgcaaaggcctctggtaagaccgctgatagagatattgctggtatcgctgaaaaagcccaacacgctgagaagaatgaatctgaagtagttcacgatgacaaggaagataaccaggaggttttggttattcttgataaagcagttgaactgcatgaatctaatcatcctgaacaaggcttcgtgagtgaagaggtagtcgctgcagctgttggttacctggatgaaaagcaagaaccagaaaagacagaaccagaaaaaacagatcattctcaggcacctgatgctgcaattggtgttcaagaaactcgtcttgaatctactggcgaagataaaagtggtgctattttggaagagaagaagttagatgtaaagaagagaaggagttcctctggagcaaaatcaagaaagaagaaaatccttggtttggatgtcgaggaattcccagcccttgaactagagcctcggtctttgcgtaatggacataagtttggtgacgaagagtctactgcagcttctcattcgccaagaaagccatcaagaagctcaataaagcctctgaatgttattctgcctgagttggtgcaagaagaatttcctagattagaggttcctaaaagaaaaggtagatcaaaagttgatcagaaagtggaacacgaagaaccagacgagattgataagcattcatcaccaagaaagacttcgtggaaagaagatcatctgacagatcatccagctctaagaacgagatcgaaatcaccaatgaagagaactttgcgagagatctcatccgagttggaacaagaacttcctcgcaagagaagaagtgccagagtcaagaatcagcaggaaaagactgctgcagacatcgctgatcgtcctgaggacaacgataaggaagaagaattggccaatcgtggaagaacaagaaggagaaagtgaagtaatagaagagtatatttacgaattgatgtcaatgatgtgttatagttttagtctatgccttccgtgtaatactatgtacaagtatattgaaagtctattacaatgtatagagtgctctatacaaattgtctaagtcgtctataacttttagaatctaagcaatgtaagaagtcttatgtctaagcaatatatctcatacaaagctcgtaggcgttaaaaaagaccatgttaacaaggaaagatctagacattgagatacctagacctctgtataatctcctttctattttctggagctttctatgctttggaggaagaggttccaagccctgttccttacgtaaaatgtttgtcaccacatccttctggatcaaggacttggtggtgtctaccgggaagattagcgcccaactgaacacacctgaaaaccctcctgccatgagaatagacacctgggacgacttcaaagggtctttgttgatgagattattcatggtccacttcatggactcgtagatagagtagtaaaatcccagagacaacgaatctctgaggaaatggtacttgaatccagagtatagtccccttaccccttcgtatttgatgatctgtcgcactatttgggctgtagaggtgttacgcatctcttggttctgtgttggtaagtttcctggaagttctttcaaggatttgttgtgaaccaacttctctagttgagcgtagatcttagtgaattcaaaaggacatgcaaaaagagacacaccaccaccagcaatggttcctgatacgaaacaaacggggatatttcgaataaatggatgtgctgggttagagtcgttaaatgagtatattgaatggtagacatgaggtttgacaagagtgaagagtgtgactgagaacgatttcgagaacgaggtcaggactagcggggcccatatcccacgaaagaaacctttgactccttccctcgtgtacgttttcttgacacaatcccagtacgaagtgaagtgtttatgggtttgcattcttgtcttgactgtgtctagtggaaagcctagaaatgtcagaagaaaagaagaaccataagctagtatagaaccacgaaatggcattagtgcttctggaaacacgtggaatgctgtgtggtagtctatatcccccgtgatggcagggatacctcgtttgtcagacatggtatgaaaattgagtatgaatatgaagaatcacagacggatatatgaagtaatggaaagacagtgtgaaaaatcaatggaaactcggaaaaaagttgagacagatagacgggccacagcgagatgagatggggcaagtaaaacaatggacgtgaattgaggaaacagatatggatagttaaggggccttggaatgcaactgtgatatttcaaagttatacggaagaagaccaagctggaagaagagaagaagatggaagcaaagagttgtatcttctgagaaacaagcactgataacggacttacgcaaaaaggacggtccgagatctttgttagtcgcgccgagtctcgtggtggcagagcagatgagaagctaaaactttaatagatctccctgagagaggtagagccgtgagtgtggtcatgtgtacgttaatggcttgtatttcgtaattgtatagaatgtcaaattgtgaaagtctcgtgaattgaggaagtggagtttatggtttaaattgagctttatatctacacttttgaattgtgagaaaaggaatagtagagattaaatctacagaattatatggacaatggaaaaaagaacatctctatggttatagcgtcctttgactcttcaatccaagacctcccattattggtgtcacttcaagatcctatgctttacaatctctcttttcgcaacttttttcgtacttcaggtttcagatcgtacgcgagctaaagccttgaagaaatagatgtctaaccgatcttctgttctctcggatatatttctcgtccttactattgtctctactttacatcacatctctattatttatatttacaggaatcgtataaaaggttaatatcctcttcttctggcatcgttcacttgcgacatcaagtccttgaacccttcggagaactttcttctccaccattctctcttcttctgcttagcatacttggctggacggatgtatctctcctgcaccttttggtaatgctttattttgttggtgaacccgagtcttctcactccggcgaatgccttgcccaatccaccgtagtgaacatctacagctctaccagcaactggacccatttctctgatgtttttggctacatctcttgggtttggaacaacgtctcccaaaccatagtcgctggacttggaatgtaaaaatgcagaattttcagaaagctccaacgacgagttcaataactcgtttatgtcattaatgccgttattgttcttttttgagttggagcttttttggttagccttggaatttttcaattgatcaaatgaagaattgtaacgaacaagtgctacaggagcacccacgaactgcttgttgaacgaagtaatagccaaagagcgaggtatcacacccacgcttctgtgcatggcgcttttaaacatggtgtggtgttggcagcgtagtgttggaagccaaaggtgactttaagatgttccaagtgaaaaattcaccttatactgagagtaggtggtgtatgcacgactgtaaaatgtctcgctaggttccaatgtcgcgagggtcagataacatgtacacaccaactgatgcaattatgggttgactgactcaacaggaaagaggcccattgaaaagacacaagatatacatgaaatccgacgaaaatgtcacccgacttttttctatacgaattgagctttctgacaatttttcgctccatttcaactccatttgagcttccttttctgccaattttcagctaatataactgttggttatgtgcactacagattaactatgtacatacacactattagtcctatctgatgatttacaattgtgtccttattctgagggaccagagttatttctatcttcggtgttctttattcagcatagacaaggatttccttgttgtttaattgaagaaattgcgtatttccatctcaatttataacagagtgaagaaaaatctgtaagaaattggcttaactaagaacattgaaccttccaaagttgctacaaattgctatcctacgagttgactatttccacccaaaacgctgtgattttcttgaacccaaagaggcatgctgtattcgtcggagatcatctccactttactctttgagtcgaccaacgtttcggtctaccgaattccgccgggcccgttgctgctatcaaaatggaacttgaaggaactgaatgtaatatggactggtagcctccggcttgtagaacaagagatgatacgtgacaatgtggacttgtttgcactgtttccagagtcgcaggcgaaagaaggaaatgaaaataaagccaaccttaaaatgccgaataagccatatgaatgtctcagagctaaacttgaactatataatacagtctacgttccacctggagtaggctcgctcatcactaccaaaaaagacgtcgtgtgggcagaggtctggtacaatccaataccggagttggttctggcagaatcgtctatagaagagtatttcaagatagccaacgatggcgaggaaaccattcagatgactacggaatcagccaagttctacaaaattatagcccagattcctggatcgggttaccatccgctttgtgagttggaaaacatttccagcaccaaagacgataaggagttgcttgttcaagttgccttgggactcaagtttgaagagacttttgataccattaccttcagtgaaagtttgaacatctataagcgccgatttagaaacttcgaggaccaataccactatgagctcaaggttcttgaattggaacagctgctgtcgaatatcacattgacagatagtgagaataaatctgtagatgacgatacattctttcagctagacactgttaaaggaggttaccatattcctgtagatggaactactagtagccagtatcttgattatcactatggtttggtacgaggagaccaaaaggcgtctgaacaaacgcacagtatttctgggtcgacaatttctacgtcaagcgtagaagttgacgatgatgacgatgacgatgactttggcgactttgtgacatcataaagcattatgaacataaatcatggtaatcatacagtaatttgaacttggccattgaactatttatttatgctatcgttgacacgtaagcatccagactctacaattgcaattacacacaattaactcctattcattaattcaaccaataggatatgataatgtatgatgaatataatgccagtgtgtgtaaattaatatatttgtatgttaaatatataccagtatgtaaattaaataatcccaattcccattaacctatctactttttttgctgctttttataatacatctggtggattaaaggatggtgttctttgagctccttgttcttgttcttgctgtattcgatgtaggccatatcttccccaccggccaaaccggccaatgaacctgtcgttctgctagcgttggcgttctctaacttcattctagtgtcattggaaatgaaattggtatcgacatcgtcgccgatttcaagtccagcagcatcttcattcttcaacaacacctgttgaagcaactctcttctttctctgggtgaagagtaagccaagtcgggcaactgctccataccactcaagtgtgtgataactttgaatgcataaccctgatctacaaggaatgcttgcctcttggtggagtagtacatttcctgtgtatccttggataccaatgagtagaagaaggcgttgaacccttcatcattacgtctcttagctcttaagatacgacccaaacgctgagcttcttgtcgacgagacccataatgagacgagatctgaatcaaacatgtggcttctggcaaatcaattgatgtgtcaccgaccttcgacaagaagatagtgttgatctgatcattgtgctggaaattcagcaagatctgcattctttcctgttgtggcgtcgacccataaataaaaggcttacccaacttcaatgcatactcctgcaaagcgtacacattgtcgctgaaaacaatgatcttgtcacccctcttttcgtggtagtgaatcaagaactggcaagcttggaactttgtgggattcatgatgtacaacaacatcctctttctggccgattccttcaagtactcctggtagaactcagacgtcatgggacaccacacttcagcgcactggacattggcgatgtgccccttttgtgcaaggtccatccagttagcttcatacaactttgggccgatcaagaagttcaagtcgtgaatcttgtcgtcttctctgaccaaagtagctgtgagacccaactttgcatgggcagcaatggtggttaccacacgtctgaacattgcagctggtacaacatgaacttcatctaagatgatgaaaccccactctctaccacgcaagaaatccatgactttctgcgaatcgtgcgatctgttacgagtgttagctaccatagaatatgtggaaacgaccaaacctgattcactggtaaacatttccttgttttccgaagtaaaaacagcgacattttctggctggatcgtacaccattgcaagaactgctgcctccactgcatgacagacacagacgaggtacacaacacaatgacagactttctgatggtgcacgcagcagtgatacctaccaaggttttaccagccccacatggcaacacaatgatcccagatctggcacgaccatttccaaacatcttcgataatgacttctcttgatatggccgaatctgagtcgaaggctttaagtcgatctccaagtctggattacgagcatcgttacggaaatcgtactcttccaaaacaggatagtcgatatcctgacatcttctctttacaatctccacggattcgttagcgatttcaaacgaatgaacggcatctacgtcatagtcatcctcgtcgttacggctgccgactaccgaggcatatatgtcttctgtatctttctttttctcgtcactttcattattcttcttagttccaggaataaccatgtcccctttggtaggggcagcactcttgaccaaaccgttgcttgtgacggtgttttcagacgactgtattctcaacggcccaataacctcgtccttaagtagcatctgcaatatatcagcttgcgtgctttctacaaagtacctgttatgtttcaagacgagcttgaccttaccgtaagaaattgtagcactcttgatgaactctacgaccttttccgccacaggcacctttgataaccgactcaaaaccagaataatatcgtcggtctccaatcccactgaaacagcagcatacaacgaatacggcgtaagtctgtattcatgaatgtgggaaggtcttgatataggttcggcgattgtgatcaaaaaatcctgggcctgttcagccaaaggcgaaaacagttctagaataatacgtccatctggtgacatccatattggccgtgagaaatggtctggtttcaacttcaagtatgagtaatccagcttaccaaacactttcagcaccgcgtcaggaacatagtccagaggtatatctggagtcaactctactaaatcgtcatcagaataaacagtatcattgacctcagcacgaattgtctctatagattgttcggcctttctctttttcgaagaagcagaggcattggatgacttcttcttgggatttctggttccatagctatagtcatcatctttacttctgctctggggttcatcttcgaatgagtcatcatctgaataatttccctgatcaagctccgcgtagttgattcctccaggacgacggtacgacatcactagaaagaaacaaagagaaacctggagttacttgaattaataatctaatttgaaaaatcctctctattaaatctgagatagcaactcggtcacgtgattagttgagaaagcttgacgaaatatgaactatttgaaagcaaatatctatggaaaaatgacaaataagtaatacattgatgcttcagtgacatatcattccaaaagattaccaattaacaatttcctaatattcttccctattataatagcacttcagaattgtttatcacgtgttaaacgcgtgataaacgcgtgatttatatttcgtacgaggttaaaaactgaatttctagttcacaaaagggcagtgtggccgagtggttaaggcgactgactcgaattattcgggttatcagttgggatttcccgcgcaggttcgaatcctgctgctgtcggtattttttcagtagtatacttttttgctattgtataccacttactacttcaatccactatttcaggttgattacgtttctacgtcattgatactattgcttctaatttatctattcagcaatctttcctatgaatctatagcaatcatctcagaccttctgagtgaagctctctattgtacaatgcgaatgaacctgtttaatcggtgaacttgtatgatccagatgcaaaagtaatggaacctcccttgtaggcgcctcttttcatcttgtttttattcttggtaaaatctttgcctctgacagctcccaatttggagttggcaacctcaccccaggtaccagcagctcccttgtatgtattgtcttgcaagacgtggtcttcaaatgagatcttggttctgtctattcttgagaaatgctttctttgtccagctttcaattctggttccacttcagctgggataccggctggttctggagaagtagatacagaactgatagattcagtttgagaagagctgtctgtctttctcttctttggagcaagatctgagtcagcttctgaatctgaagaggactcggagtcgaagtctgaagaggactcggcttttctctttttggattcaggcttggtttcttcttcttcgtctgaatcggaatcgctggaagagtcggagttagaagagtcggatgaagaggagtcggaatcggaatcagaatcagaatcacttgaagagtcggattcagacgaagaagagtcagagtcactagaagagtcagaatcagatgaagaagagtcggaatcagacgatgacgagtcggagtcacttgaagaatcggagtccgagccggaatcgtcactagagtcatcactagagtcctcgctatcagaagaagaactttccttctgagaagaagttgctggagtggcttcttgagtcttgtcctcatcatcagatttatcatcagattcatcatcagaatcagaatcagaatcagagtcagagtcagaactactagaatcagaactatcagagtctgaagagcttccagaatcagaactgtcggattcttcaactttggcatcttcttcagactttggtatcacatcttccaacttggtttcaacttctggcaattccaagttttctgcctccacagccttggacaaagccttggaaaccttggcaaaagcactgtcccttgataaatactccttaatatgtgctaatacgacttctctggatacgctcatggtctctctgcgcgtttagcgaacttaaattaaactagagaaattaccgataaagttgtatagaaatacgatggattgaaaaattcataaaaaagttttgagtcacgtgaatctcatcgaattttgtcacgtgaaaatattcaatgttatatgcagttttatgatcgtctcttaaacatgaaattagtgctaatatttaagtatctaaaacgtattcagggcgctatccactgatctacaacttgggtgggagcttgtaaccgtaaccgtgcaattcaaggaaacgtccctgaagcaattttccttcaacttcagcttccagtatcttttctttggagcctttgaacttgaattctggtacttcttggaggtgcttcaggtagtctacttgtctctttgtagtatgttcttgtagtattttaaccattacgtcaggctgttcggcatggagtaagtgctcaccaccttcaacgtcatagacgccaaccaaatattctggcttaatggcacctctgaaaaatggatttgtttcacgagcattccacttggcagtcttgccagctacatgggtgattggaacgttaatatgttggtattcgtccatacctgcgataagcgacggcattcctgatgtgtaagctgctatttgagcagccttggatgtctttgtcttgaacgacttcttgtcagaaacggggtccgctacaacaagcaactcgtcctggataaagtcctccataactcttggatcaatattcttgtagaaggagtataccttgaaaaaatcctcataatccttgtaacttgcaaactcgtccacaagcatcaggccaatcatggcgaatcttttggcaaacttacctatttcctttgcattagcgtacaacacaggttccacagcaacgatagagtcaaccaagtttggttcgtggaagccagcaaaaagagacaggaaaccacccatagaatggcccacaagaatatttctcgacttgagatcgttggtcaagtctcctgtggaggcttgttcttgtctgattacttcaagcaagtcccttgctccttcgtcccatctggaaatccagccaagtttaccatcgttgagaacaccagaatcaccatggccaactgcgtcgactgacacaattgtgtcgatgtagatcttgccattgcttttcgcctgccattcaaacaactgagtgatgtggaagtgccaaatggccttgttcattcctgtaccatgagcaaagacgaaattgaaacgaatggcatctgctgggattgtagtggtagatttgtacttgttgtagactacatttaatctctcagaagaaacaagagtactaccaggtgctctgggaaagtgggcattagcgactttcttctcgagggtgtaggacatcttcagaatggactattttatcagttatgttggaaaagctacaagaaaggtaatctattttccttgaaggaaaccactcacctaaatagttctgtttttatttcagcctgcaaccccagatttccgacctctattctattgggtaatacccgaggaaacaaagaatgtgacattcgtcgattaacatgcgacttcatggcagagaacttctgccgactgtttcatgtgacataaagacttcatatggggtagggatcagactccacggctgatattgtacgccgtctttgtcccatctctaattatatccggagaggggcatggtaaatgagaatcctgtatttccggctcgatgctttagaaccatctccagaaatctggggcttcagggtagcaaagagaggcctgaagtaacactagaatagttagtgtagaagatgtagaatatgaagaatttcgagatgggcttacttcggtatggcaattgggaccgaagaataagaggcgaagaaagggaaccgtacggttgaattgcaattgctctacaatctgatttggcttgagattgttcatgtgcagattctttcggcaatttcatgcgtagaacctttcagctttgattccgaaaataaagttaatctactatctccagttgcagccgttgcaagacgactgctttgctttccttgcacaagccatcatcaatagtttttcgttatcggactgtcttcagatattcaagtttctaaagattttggtaaatctagtctagttatttagtatgagattgttttattagcatgtattgatgcttcttctaataaactctatagaaatgtagcgcttacaacttggaagctttggccaaggcggtgtgttgtattccgtacaatgtgcctaaatcaccattaagcaacttggggatctcagattcaaataccttttgtctcaaaccctctgctttttgctctggaagttgcgcagcagtacttttgaactcaacttttctcttcaagatgaaatctttgagaacctcgagtaaatcgtctggcttttccgcattgaccaaatgttcacctccttcaatatcgtatgtagctgctaaaaaatctggatttacactgcctctgaaaaattcagtggattcgggagggttccatttagcgttcttaccaatgacatgggcaatggggactctgatgtgtttgtaaatatccatgcctagaggcaacaccaaagcagaagatacatatcctgccatctgggcttgagaacttgacttgatgcggtacttgacgtctttggttttagggtcgatcacttccaataattcatcattcaagaagtcgtccattaccttggggtctatgttcttgtaaaacgagtgcaccttgaagaaatcttcaaatgcctgtttcgtgtcgaattcattgatgatcatcttgcctatgatcagaaatctctgagaaaatttacgagttgatctggagtcaagataaacgacaggttctattggcacagttgcatcgaacaagtccggctcatagaaagcagccaacaatgacagaaagcctcccatggaatgtccaatgaggatgtttcttgacttgaagttattttggaaatcccccgtagttctgtgttcgtttctgaccacttcaataatgtctttgcctccttcgtcccatctgaaaatccagccgagcttattcctgttgataactcctgaatcaccatggccagcagcatcgatggcaatgacggagtcgatgtagatttttccgttgctcttctgcgaccactcaaacaagcttttgatgtgatagtgccagatcgacttgttcattcctgttccatgggagaaaatcaagttgtatctgatggcatctgtaggaattgcagccgttgacttgtacttgttgtagacgacattcaaggtgtctgaggctaaaatagtcgaaccactggcccgaggtatatgggcagtggttatctttttctccaaatcgaaggacattttttcagtagagctgggatacttttatgaataattctgatagcagaaagagccgtttttaaattgaaatgtcacttgcatgcaccaaaaaataaccgaggaccataaccttaaaccggatatgccaattttctggatctctattttcacaaggcataaggttagagcgataaccaaaatatagaaaagctccagatggaataatcgtaaattgagtagtatgggtagtcatatttgttcaaccagccaaatcccggtcccttgtagctcacttcttccgataaagtctaattccgactccgcagctcaactgcgggttatcttgccagtaatgtcttgtttgagacctcttctttaatcgaatttttgctatatgaaaagattcttgtaagtcttcaggtataatgttcacggaatttccaagtgtaagagtgttttacaagtacccatgttcataaacactgcttcggagctagattaaagtaacaggatttgaagctcctagctcctggaccgcagaatagcagagtcctgacatattgtacgaatttacaagtcaaccaccattgcctgccatagctatccataaactgttggaaattcaattgttatatgttgagcataaatagcaactacagcagttacgtagatagcaacacagtgaaaacacaaatttgcagagcttgttcttaatactctatgggaaacctccagaaacaggacattttacactgtattcaaataccgggaacctattctagaacattgagtcttgagaccgttgactgtctacttctgagacgtttctcatgcaattcgaacttccggattttaggtgcgcagggtattagtttttatattccgtgggcagcataaagcagaacaggagttaatgcaactggctgtttaagcatatgcaaacgtctttttttaggctacagaaataattctcgtaagttccctaatatttcattgtttcaaagcgtgtaaacctgtatcggttgaagtccgtggatgcattggcacagggttaggatttgaacaacggctgttctaataataaacaatgtttgaaatacttgaacatctttccatacttgcaatctcaccattttaaatgaacatgctttcatgtcgaacagaacattaacaaagtacatagtttggttcagatgtcactccttcttttgtcctaattgaaaacagagacttcgtcaaaattgcagaaacgtttggcttcagaatggtttcatgttctagccacattaattacatatcccattccatcctggtaccagaagcatgtgtgtttcactatatctcttctagaattatgtgggtgcatgtatatcttgattgtgccatgcatttgcattacagcaccaaaaggttccattgcatttcaggaaaatacacaccgttttgtatgtgaacgtgttagaaaatagaaattctgctttcgggaggctgcggtggagtttcatttcataaattactgtattggtgtaggaatgcctttcgtaacgttttttggttattttacgagaaattaattcacgacgaacaataagcagaagatatttagtatcggagtcaagatttttcttcacaaaagaagggtttatctgttttcttttcgttatagtctgttgctaaaacagatgataaatgtacggaaaagtatagagcttatatacgacggactctcattttttgcagccgaggttgcagcccaaataacaatatagaagccgatttccagtcgaatccagccacccaccttggaaatgtctcgaatgaattttgaaatactattagagctcagaggggcgaccaggtagattattgagtcaaggtagccagtgctatccagttaatatgtattctgtatcttcgtctgtgtcggggcctcggagatgagatccgagcatcacgatttggcctgaaaaaaatttctaccccagctttttttttcaccactcttgtgctgagtcttttagtctgataactttgtatcgccatgacggtttccaactctatcaagatattccgcactgtccagcaagtcagacaatggaggcagcattgtcttttgaaccgagaaacggttggctttataccaactatgggagctttgcatgatggacattgtactttggtgaaccagagtttgaaggacaatgacaggaccgtagtttctatcttcgtaaatccttctcagtttgctccccatgaggacttggatgcctatcctcggacggtggacaccgatatgaagttgttgtctcagaaatttgtctctaagcctgtagatgctgtgttcattcccaagattacagagatgtacccttcaggaatcaccctagatgtcgccaatcagagaggggctttcgtgacagttcacggttgttctgaacagcttgagggagtaacaagaccgcagtttttccgtggtgttgctacggttgttaccaagttattgaacatagtcacgccagatagagtgtactttggtcagaaagatgcccagcagtgtgtagtgataaaaaacttggtcagggacttgttgataaatacagaggtcaaggtcctacccaccttgcgtgaacaaaacggcttagccatgtcttccagaaatgcctacttgtcagactccactaaacaggaaagtgctgtcatctaccaaggcttgactgctggagctactttttacgaacaacaaaaagataacggagccgggaaggtatctagtgcggaaatactagacaaaatcaaaaaggtgtatacttctaacaaggattttgaagtggagtacattgctgtcagccacccagagacgttggacgatttggagtatgtagttccaggcacaggagctatcatctccaccgccgttagggttccaaaggaagacggttctggtgtggccagactcatagacaacgttgtgctcgtatagattttgtacatagaaggtctgtggggtaagataccccataaaagttcattaatgttaataagttctaattctaataataaagctacgaaactgacgaaagagtgattctgtagattttaaatacctcgtcttttccattttagggcaccaactttgctatcattgatgacattgagttgtttctttttatggcttttagaatcctggattttgcggtaagtgtccaaatctttcttgaatttcatttgggtttcggaaacgtcaagaagttcaaaatcaaccttgtcgagaatcttcagcttgtatctatcagggacaaagaagaacttgttcccaaactcaaacaaccacaacgggtctactacggtcacaacattcatgtattccctggttgtcaaaaccaattcgtggtagatgacataaatgctttctggagtacttcctaccaaagcactagttggatgtaaatacattttcatatagttgtgacgaagattgataaactcaggactgccattaacattgaccttgatcaacttcgccagttgttggaaaaacgaagcacataagcactttcttatgtcatcatctgattttgatctgactacgggaagcctgtttttgttcatgataaatattaattggttcttaatatctttagctctaagcaacgacttcaattgaagaaagttccggctgcaccaactattaatcttgccgtaattgttcttaagttttcgtaagttcgtttcccattgaacatagacattcaacaaagtgaggtgatctgattctgatatgagaaacttctctcgagccgcgtcggcttcttcagctctttctttgggtctgaaatacacaggtgggacagaaagcatggccacaatagttatgatttcttctgaacaattgaattcgggtctactcgacaagattatagccttggaaagggttggctctattgggaattccgttagtgcccttcccaaatcagtcaagtcaccaaagttgtcaagtgctccaatagaccacaactcgaaaagagagcaattaagaacatctttgggagggggatccaagaatggaaacaagttaatgtcgtcaacctttagcgattttaacaacaataaaacgttggtaagatttgccctttggatttcaggaattggctgaagatacattttatcctcttcaactgctctttccgtgtataatctataagttatccctggacctgttctaccagctcttccgcttctctgttgggcgttggcaaaagaaatgggcaccacttgcaatgtgtccattccaagtttgggattatacactttgaccttcacaaggccagcatcaacgacgtacttaataccatccactgttaaggatgtttcagcaatgttcgtggctacaactacttttcttttggagctgcttttgctgaagattttcttctgtaagtcagccggtaatgcagagtaaattggaagtatatccaacggtggtgggttttctagcatatctagtttttcttgaagaagctgacaagtcatttcaatatcctcttgaccagtcataaaaaccaagatatcaccatcgttctgctggtcctgtgacttgctcgcagtctggaggtgaatagtcaatatctgtttcactgctgcctctacgtagtctgagcaggtattcttactaaagaagacttccactgggaaggttctgccaggaatggtgaactgtggagcatctccaaagaattgagtaaagcgatctgcattcattgtagcagaagtaattatgagcttcaaatctcttctgcgactaacaagctgtttaaataatcccaataatacatctgtgttgaccgacctttcatgtgcttcgtccatgataatgcacgagtatttctccaacatggggtccatcaatacttcacgaagtaaaataccttcggtcatatattttatgacagtcttttgagaatcagtcttgtcttcaaatcggatagcatacccaacttctttcccaagaacacaacgtctttcttcactgactcttttagccactgacatggcagctactcgacgaggctgtgtgcatccaatcatcttacgttcaccatctgatgccaagttagctcccaacccttcttcatagagaaactgggtaagctgtgtagtttttcctgaacctgtttcaccaattacaattgtgacttggttttctttgatagtcctaattaagtctgtacgtacagcaaaagcaggtaatgactttcgttgatcgttgattcttctctcatcgtctacatccatattgtaggcattgtcttctgaatatcccagtggcttctctgtaggcacactttcatcgtctcctccaagtacatttcctatcttggagcctccaaacccggctctttctttagcttgagctgctctttctcttttcatcttacgttctttaacaaccatgcttccagtcttggccagtaccgctaattctgatgttgagtctttgattggatttatggttggaccaatgctacgtgcactagttccatcatctagttgaatatgtaaatacttcctggtgtcctccaaaaacggagggacaaagctgtggtacgttataggaattcttgcaaataacgaatctccaccctggtcatgatcgtaatcagtatactcgcctgtcaattcgttgaacccacctccagttttgttgagatgaattcttttcttaacttggaatttggtttgaggcttttggtatatggcctctaaattttctacatcttctttggctgcttgcccatactcatctgccatgtaccattctctgtcgttttctatgttaaagtcaagaatttcatcttctcgtttgagctcgctgaacgattcgtcgtctactgggtcgattggatgtacttttttgggttcagtagacgtacctgttttctttgtgggtactaaattttctggtttccttgcatgagacttttcattacgaattggcgccatctcgacatcttgcttaattcgtaacgcatcttctttcttgattttcttgaaactgaagggcttattgtaagttcctgacttgataggaccttctttttcttcttcctcgtcactgaacagcaaagttactcttttgtgaacttttgcaccggttgtctttattgtatcaaacttctgtgagctttgaggcttttcatctacttgttcgttttcgtcatcgaatacaagtgctaattttgatttcttcagttttggttgcaacttcagatgctctttatgtatacttgtggaacttgtagttggagctgaattattgtttctattcaattgtgtttccaaatcatagatatgtccagatacaaagttgtagatacttttggaattttcctcgtctacacccaacactttcatgaatgttgaaaactcatctggagttctgcttcttttgtagaaggaagtcactgaacctataagtctatcattaatgtctttgttcaacaacgacgtcaatctctgtttgaggtccgagatcacaccattcccttccatctgcttctgctgttagagaagaagaagaattaataaagtgcattttgtcaggaagtagaagttcatcttatatttagatgcgcacttttggcactttttcgcgttctttctagaaattgaatataatttagcgaagtctgaagtatttctccagatttcaatttattttcaattatattcatacagctcaccgatagctgctaacaaattgaatacttggtcatgaagcctggtatagactctttgcgatatctcgtctctgtacggatgcacatgtcacctcctcctacgaactccaaagaagtgggccatatcctcaatggattgcgaaacttgggaaaagttgagttcttcaaggtggaaagggacaagtccaattgcgctgtttatggccaggagctctttgtagtattcaatccttctagaaaagatgcgtttggctctattgaaataacaaaagaaattgaaaatctgaacgacattaattcagtagaggatgaggttactctactagcatcgcagaagaagatcgttgacaacatatcatccatagtggctcttccacgttattcgtatatcgaaaacgacgaacgatatttgaatggagaaattgagataccattcaagcaccgtcttgtcaaagacggcctaaaatacgataatcggtatactattccatcatgcacagtgtataacccctttgctcatatacggccggctgaaaatgaaaagaatttcaattacaattttctccgtgctaatatacggcacaacttccagaagtttcataagttcgatcctatcactatcaaaattggtctctcgcctttaaccagatggattctgcccaaaccaaaaaagagtatcccatttactgggttcatatagattcaatattgcttaactgtatatataacatcattaccatgaatactcactcggtctctacataacatttactagcacttagcagtatctactattacttttgttgtgatctatttaatatacattagtaggatcttctcttagcgagaagcaaccttttccaccacctccaaatccttctccaacacctcgttcaagtagttcaatcccatttgttgcttcaagagaaccttggataacttgttgatggtctcttcgatattgctgtttttctgttcagccactctctgttcctgtttgtcatcattagccaaaccgttcaacccaccaatagagacttcgaactggtagttcaagtcctcggctctctctttcaagattgccaatctggcaaagacgtcactcaacttccctacgggactgtttggatcattaagcttagaagataacacatcgaactgcttggaaatctcttcttcttctggcaaaagagggtaacccttcaacttcaagatggccaacactgtggccaatctcaacaaccttcttgacaactttgtatgtttggctttcgcctttaaaattctagtagtattttccaaatcgtgcttggaagacaatgcattcagtttctcgttgatttcattcaatatcaccctagactttgacacatgttcaagctgagtttctattctctgtgctacatcgttaaatgacgaaatcttgataggataatggctagccgtgggtcttttgctcatagcgttatcccagtcttctggggtttcgttgttaggtctctgctggttcaagagaatgttgatttcctgctcactgaatttgttgtagaagtgagtcttcaatgcacatttaggcgaattagggtcccattgctctttgatcttgatcaactgatcgtttattgctggtgtatacttgttattagtgttggaagctggagctgccgatgcgataggattagttgcaccaaatgtgttgtttaatgctggttgagacgtgccaaaactagacttctgttgttggctactgttccagccaaaagctggctgggcattgttggttgaattgactccaaataaagaagactgttgtggttgttgttgttgctgctgttgttgctgttgctgttgctgctgagatccaaacaatccccctcctgtattagaggctgtattagaagttccaaaaagtcctccacttgtagatgctgccggcttgcttccaaataaactagaaccggtattgactccagaattggcagtattggcaccaaacatgccggcagtgttgccaccagaagcagtgttcccacttccaaacaatcctccactatttccagcagctccactgggtttattgccaaataagccaccagaagtagctgtagagcctccaaaaagtccacctccagcagccagattttgctgggtatttccgccaaacaatcctccacctgtggaagccgctggggcagcaattccggcaggcttcccaaacaaacctccagtgttagaattggtagaacctccaaagagaccaccaccagcagctgtggctggtttgttacccgtctggccaaatccgccacctaaagtattactagaagcaccaaatcccgaagctggagcggcatttccggccgcattgccaaaaccggtcgaattggaagctgaaccaaaacctccaactccgctagaagaaccaaaaagccctccagaggtggcgggagctttggaagcaccgccaaataaaccaccagagtttgtgttcacttgcaatgggccgctagccgtagctgtattctggccaaaggttccagacgctggttgtgctgatccaaacatggaagaagagcctggattgttctgagacgcaccaaaaagaccgcctcccgctgaatttcccgaggaaaacatgctgaaagtaacgctatatgtattccgtgaagcctctgctttgaaagaggaaacagagacgagaaattggcgttgtgagaaaagaaagcgagcttgacaattcagatttgactgttgataaatttgatagttatttggatgaggttgaattcttgccgtgtatacaggagaaatgtcttaatgtaccgaaggagagtacgggctccagtatgagagagctaggtactagtggggtttctgaaatgttcaagatgagatagagagtattagagccatttctgtgaataacaacctttaagaataatttgcgaattgtttcccaaaggtatatatctatttaattgtatagttaaagatgagctctagtattcagcaggctgatttccactgccagtacaatacaagactactagaggatgtcatattaaatcctaaaataagactttcagtgcaattgacgactttgtcaaactagctattcattaagatatttcgtaaaattcagaagcatttggtaatctcatatggtctcattgaggactccgttttcgtattgattcttacaagatcctatagagcaaatgttgcttcagaagtatatcgtgcctcacgtaattgaagcatgttcactcttgttgtcatacactcttcgttttctatccaaatcctatcctacaatctgttaacgatgattcatatacattttctaaatatgaattccaagtcatgaaatgaaatgcagaggcaacaggactcgtgttctgctaccattgaactataatgtgagtgtcatgatactcgtgctgataaatacaatgtctacgaagcagcttctttggccttaacaaactcggctgtcttcttcttgtcattggaagtgccctggtaaatagggttctggttcaagtgaatctgctgttccacaccaggaatcttcttctcaaactgcaagttctggaaaagacacttgtttaaaacagattctgaagctctacagtgacccattctgtggttctcttgttcgagacactcgtagtgaagcttaaactcatcaaagcagtacttgttgatatccttcaaggcagaaatggcacatctcgtgactcgtcttccttctttcaagcaatctaatgttcccccgtttttctcgtctttacacaacataaaatcgtcattgtatggcttgcacttggctccaatatagtatgatgccgataataaaggtgccgaagtggctcccacttcatctacttcgggaaccgagtccggcaatccatttttgtccacattctcccattggtgtctggaagtgaataagtcgcccaaaaccatcgtgaaatccctgagttttgcagtcaaatacagcttccgctctgcttaaagattttattgcttatactgaaaaatgagattttgtcgtcctttggttggtgctgtcaattacacgggatacgccgcgaaaatgtaaattatgtaccgaccacgtgaaactactcacgtgaaaatattgaaatttaattctagtatatcctattctattcagttacatccagcagagtttctactaattcgtattccttttcacaatcgtaagcaagtcttcctcatgaccaatcaccttgtacacatttaaaagttcgagaatgagctcgttcacctcacgatctttcttgttccgtatagctgtagtaagaacatcgtctagatagctcttgaactcaaacttcaacgacgagatcttgttgttgagataattctcgatgaattggttacctgtagatgtagtgctgatagccaataaacttgcccttctagtgttattgccgttgatgctgctgttgtcgctatttgctccatttttcactgttgcttcagatggtttgggagtatcttggctcacgaggaaatggtacaagttcgagatagacaagtaccagcccgtcaagctctttagtttgtgaattactttggcataccctgcggccagcaccggctgttctgcgtcttctactgttaatgcgttttcaaagttggtcacctgatcgttcaagagcaagttgaccttagctagagtcttcaatcgtatgagctcctgccttacagccaacgacgagtctatgagttcgtatgagtcgccaaattttgtgtgatagttgatcaagtcgagacggaaattctttaagtctcccagaatcaagttgatcaaatcgagcccgccattgatagacttgcctagttcgatgaaatcgccgtagtcggtattcactaaatccaagaggttctggttcaagtcgtctgataacttcgtcaattctttgatcaaaagatcaatcagtgtgaaccggtgatttgaatataggaactggtcgatttcactctggttgaacttttggaaatctgttctgttgatggaaatcggatacgggaaatcgtctgttccattgagaatatccatgtctgtgttcattgtaacgggaatataaccacagaaaattggtcagatagatgtcaaacaccaaataatacaattagcaagtataaaagcagtttagttagcgcaatcaagagacttcgagctcgatatagaagacagcctcactctcgttgctgtatttggttgttcaaaaccatttccaaaaagcgtcctgcatatcaccacagttgaaaattgcatgttggtaaccggtcaaatctcaaaatctcgtccttcaaagctccaattccgaaacgtcaagatcaacctaatttcttccccaagaaagtcaccactttcacactttctgagcggactccccagcagtattcgagtggagatcgttctgcacgccacctattaagtggaactttgaagctcattgttagcgcagttgcccatgactaccccggatttacccattcagtatgaaaaaataagatctggtgaagagttacagtccactgtgcttagaatattcgcttgcacaatgaaaaattggtgttgccagtgggcgtaataataacttttttcggagattgtgaactttctccgagttcacagccgagttgacaggttgcattctaccaccaccaacgcttgcttactcagatttggaattctagagctaagccgtgtacaggccggagatgctgccggtcaacagacggatggagcttcacgtaagtggtgccagtttgttgccaatgaaactaataaacttccgacgcatttccgactgcatttacgcctgttccgctgctgtgctgacagcaattgttccgctgctgtacctgaggtacctgagcgtaaggcaattaccggcgaacgccctgacgaagtcaatcaagacgggaacgtgaagcccttgctggctgtcgcaactgtagtgatggtagagaacagaagagacttccaaacttgttgggaaatatttgttccatgcactcccctgtaatatttttctgtaatgttgatgtaaaagtaaattagatcattacactaaatgtgacaaaagtttgcccccggaagtggcgatgaggcactcccggaagtggctgagggagtgctcaggggcagtatggcaaaaataccgtcctgataccacagggtcggccaacttgcgtctgtgcacaccagtattaggttccggctcgtgcatacgtaaatgctttcaggtttgattagtcgtcgaggatgcctcccacatagttcccgacttgaggccaggaaaattttgtgttttagtttagaagataagtcacaattgtggaaggcacggcgtagttgatgcggagcttgtgctgctaaaaaaataatccattgccgccagcgttttcaaactcaccggagtgcccctcctgccactttgcctttcacagatgtcgtgctgccgctggttctctacttctacatgcacctacacagaaaaaagtctgaatttctaatctttgattcgctaaccgaattacatcatttttcagtgtttgaaggccgattaaaagttgatttagtaacgccatacctaattagccttatttttgctggctccttttgcccttatctggcaaagccgtacaaaaattatatcaaagtctgtagccatatctgtaaatttcacacccctttgacattccctactggaaaactgccggataatgaataagtggatttccgtatcaagcccaactttcccaatgtcgattgcatgctttcccatgagacttgtccatgttcgggacccctattttccaggctccaaaatacgcaaatgaacaatatggcctcttcatcttacttcatctccgtattgtttctgtgaagcgcactattgggagatagtagacttgttctgcagccttgtgcacgccgatattgacttgcacctctattgtatcttcgaaagcaacctcttgtccataatgggaagggtccatcgattgtctcctcccctggcagcaagaaaaacgcaagaaaaaccctccgtgtagacgactcttgtactgcctcgttcgtttacaaacggaggaacaagcgtttggatcccgaaatgaaactattccgcacgttcccatttcagataacgtctcatcataagcgggtgattttttgaaccattccgtgacagaacctagaaagagcacaggaaattcttggtgctaagactctcaaaaattgcgccagatttaaatttcgcaacaactcgggaaggtgacaaggccagatactgggcacagttgctcggcacagctgctggggcggctctaacctgtcttcctggcgtagtaaaagatgatccacgcaaaaaaagtggagaaactggatagaatcccgctggattgaagctggtccaataaaaccatatagccaagcaagaatgttgattgaacgtagcggcgatctccaattgtttgagctgcaagtgatgccgagtcaagacttctatatacctgtttcatctgtatccgtaggacatggacagctacaattttaatcctttatcaaagaatatcgaacggttatcgctttgcttgtgatttctttagtttctaaaaatggacgcgcctatctggcaggtacatactgtcatttggcatctgtgccttgagctcgggctctaaccatgacagctgtctgacgtagcaaacaacggcgaatttggcatccaaatcaacttggctacaaaaagtcttacaaaatcaccaagtgttggaagtgcccctttatttttgaggactagcagaagcgagttaaagtgttgttttcatgcttgctgtccagcgctgaggaagcgtcccggaaaatgtacaggtgcagtcttaagagcatgaaaattgtttatggtgaaaaatattgtggatgcaacctctaattgaatattcagattgtacccacatagcgagctttcattttatgctttcccttgtccaaagtcttagtcagagattaattttgactatttcacctggaggagaaatttagccgctttgactggaaaaatgaatttctgattgcaagaagagtgtagacagatagaggtgcggttacgaagaatttagcactggagtgactgggacaatttttatgcgcaataaataaaataggtcaagtaaatttaccatttgtaaaccagtaatgtggaatcttgaaattgggtagacttacgatcagaatattttgcagctgaacgttttgaacccggcaaatacaataggcggttcagcaggaaccgcatttgcgcgaaataactcgataatatgcacagttattgccgtcattatcgggtggtttgcactgctgaaagggaaaacgcgaagtggttcctttttcctttttctcaattgtctaacaatcgacaaataatagataatatggaattgtcgagactacaatacgttttgaccgtccattgtgttatagccattagcaagaaatagaattttttcctgtcgaaaattgtacatgatcaaatttgtgcaccagaggcaaattcctgaacctgaatccactttcctggtagtcccctccttgccaaaatcctgatagcacaggtgcatgatccaaagcttggaataggctttagacaattataatgtgtgcagtccagtaatccgatgcaattgttgcccgttttgatttaatcagaatttgcctaattgggccaacaatttcacagtgtccgattgcatacaggcatgaaatgtaattgtaccaattttttatcctccaatctggaaaaaggaactcgatattttctagcggtgtgtttgcagacatgtacaatttacactttatttaggttaggtataagtaaactttattctctgtgatacatggccgagttgcataaacatttttttttattttcttgccgttttcttttttttttttcaatgtagaagataatcactaagattttgatgtctatagttttgaacagaatctacaatcataatataaggaatatatatatttaaatatatgtccttcttccggactctgtatttttaccaggttcacgaggtgctaccatttgtattttgttttgatttatcggtttgcactggtcaatcagcccaatcattaccccagttagcgaaatcttccgtaaacccatcgcacaggccgagcccagtgacgaaattaaattggaactgccatccccagcccactctagctatccggtgatatgtctactgcagtgtattacgacaacctccagatgccacttgaagacattcattccaaacccagcaacattttaccttcattagcacagattatacctccaatgagccaccaatcgcagcagccccacagtattcagtcttcctcgtcgtcgtcctacacccacgatgcgtcgcttgtagccgtagctgcttctccagccaactccactcccacgacaaccaccgggcagatttctcccaacttggtaggttccagcttgcctgtcgcagtcaacgtttccggcatgcctgtttataccgattccaagacgttgtacccttctagccagtctgatgtttacgtcgggctgcaacttctgactgccagcacgacaccagctgccttagcttactctgtcaactccaacattagtcccagcatcaacgttaatggcaatgctacctacggcacaagccagatggttggacctggtccgatgaacggtgccgaagaaaaatgtatttgcaaactgaacgctaaccgtattcccagaccgcggaatgctttcattctcttcagacagaagtatcaccagtcggtactcgacgaaggcaacgtgatccggaccaatcccgaggtttcccgtgaattgggccgtagatggcgttcgctttcggcttcagaaaaggaccactggaacaacttggccgaggaagaaaagaagaatcatgccaaaaagtaccctggataccgttacacacctagaagaaatggtaagaacaagaattgccctgcttgccgccaaaaagctatgagacagcaacaggttcaattgcacaaccaacagatgctccagattcagcaggaacagtaccagcagtacttgcaacttcagcagcaacagcaacaacagcaacaacacataatgagccaacaacagcaacagcaacacataatgagtcaacaacagcaacaacaacaacaacacataattggacagcagcaacaacagctgcaacagcaacagcagcaacaaaatctagtggcccagcagcctcagaatgctcagcaaattcagctccagcaacaacagcaaaactcgcagcttgcgggtgcaaatcttatgggtgcaaaccagcagtatgtgatttcgtcaaacccttaccatggcaacgttcttgtggctcctccggcagctgcaaactaccaggtttcgttcaacaacgatttgggcagtgttggcaatacaagcagcagcagcaaccaagacaagttgtcgccgttatccaatatccccaaccaacaatttgcattacatcctaatacccaacaagtccctgctggatcaggcactactctgcataacccttctcatctaagctcagcttccaacgaaataattggtggttctggcgctcagtttgctattggctacgatcagcaccagcaggtacagcaggtacaacagccggttgcgggctactaccagcatcagcagaggtacaactctgctccgggaggaaacaactacggctacgacagttttggtgttcagcacggttcgcaacaataagctgcaagaccggctcaaattgaaattcccttgtatatataaaaaggtgaactagtttggaacagtggacgttgaactaatagtctggttttgcggacgagttgttccctctgtatactgcagaatattgtaacattatttgacattaaatttagttagactttaaatatgatggatacttcagcatcataataattattgtacaaataaaacgtttcaaaatagactacaatgtaaatacaagttgatttctacgacagacaatatgaacttgtagaaattagatttttcatagtttgtttcactcattctacaattcgtgataactcccaaaagtgaaaatttgtgttttcactattgacaactgcattttcggttttaccaataagcagtaggttccaaaactaaatttgccattcagaaatttttttattggaattatctatacaacctatgaatgtcttcggaaggacaagtgttctggaagctggagtgccttgcctttgttgtattgttcccagaatttctattcttctgcgggtgccatatgattttccaacactgaaatcaattacttgaatttcattgttgaaaaaaattgtttcgatggttaagaacaagtgaacaaacgaattcgaatcatatcagctctgtcgaagaaggaactggtagaactcgtaaaaataacacaaggcggctaatttcacgagctatctaaaattaagacaaccgagtagctattaaccgagtagctattaaaattaaactgatattatattgttgtttgcgatcagctcgggggtacctactattaatcattgttaaagcaagcgatttcttcgccaaaaatcaactgcaattaacaatggctattctgcggtcaatagaacccagatgtctgcaaaggattaattaagtacaatgaaaaagaaggcggttgcgggcggccagtcatgattaacgggtctaaacgcaagttctaggggccagaagctgggattaaggtcacattagatggggttaacctcccatcagggtttagacaatgattcgttccaaggagtatatccatacatccattattattaataagaagtggttcggatcccatatactattcattgtattttcctccatcacttgaattttgtattgatgttggataaacaatgatggataacaagaaccatgacaatacactgccctctttttcttcacaatagtgacctttgttggttcacaaattcatttgaaaatcaagagttgatttcacaagagagacaaagagctattttcaatgaagatttattgccattgaccacaagtaaagaccactgttgtttgatatttgacatagatacaacccattcaactccctcgacttcgaagtaagggtctttctctaccgtattgttggataactagcttcaatgactagaaaccacagaaatctggttgttaagaacaacaccagattgcgtcaaaccattcaagattattttagactgatttacacaggtggaagccatcacccgattttcaagggatttaattgtcgatggagatatacggcatcaaaggagcatgtgtcttggattttcgatgtctaaaacatagccatgatgcacagcgaccacacctaagctccattccgaggcacgaagggttcaagctgtaaatacgaaaaattccaaagactaaacaattttttgaggcgatttttgattaacagagattgttacaatgaatagaatctgtaaagcgtcacctcgaaagttctctattatagtattcctgcaatagaccccttactagggtggaaagctgcccatttttaacgcaatcaacgtagaggcgaatttagtaaggtaccatggccaatatttgaatcccgaagacgcccaactataattgtaggtttccttgaattgttagaaaggttgaaaatttataatgaactttagtgattgggtgcgaatattttattttcacaagacagcgaagttacgtacgaatttttcaggcaccagggccaaaataattgggagagcttctccgaccttggaaaagtatagagatatacaaaacagacatctgggacctgcctccacttacagcggatctatcgtataataagaaaatcaacgcaataatcatttccgtaattttaggttttttagaagatgactggatggacttgaacaacttgaaacttttgtacaacttaaagaggaaagacggccctagataggaaatattttaatgtaagattcggatacagacaaaaaaaggtacttgataatcactagcgggttgttctctaccattgtccctcagctaaatgttagtagcatactattgttaacactaacaaagacaagggggaaacttacacctgttttatctgaattagcattgtattagttgggattagttagaaaattatgctcccctgggggaaaaaatacctatggaaatccggatcctcggaactgtcagaaagtgaggttacgagcccctcgcagtgtaaaaaatatcgggaagaaaggaaaaattaaaacattaaaataagacaggtgtacgaagaagagagggacaggttcaattaccatattattgtttggatcgtttgtcgacaataccatggtgattgtttgtatttacctgtgggtttgacgtagtcgagtgtgtgggattgtttcgtcaaggaaaatacggtgcctttttaaggcaccaccatgttgattttgatttcacattagatcaccatgccaccacaggttgtctgtttagacgtatgtaggtttccattccaccactgcctgattgggggacagtctccgtcctgatttaataaacctaaatgacgcactacgtcagcattatttttttgtcctggtatcccaatagagttggagcggaatcagcttagccaaatgtcccctcgttaactgtagaagtgccaatttaaagccgctgtggacaagactcatagggagcaagtcatcgcgcaaccttgaacaatgtcccacgaccctagatgatgcgcagtacttggtttcgccgctatcactggcagcccaccattggctgttccaaaaaatagcgagccgcatcttcccaattggactgggatcttgtgtggtatgcttgtgtgcagaccatacaatagcccttgaccatacttgatcggagaatcaagatgtagctcccaaataatagagtggctgagaaggcggactgaatgcaaaaatgctacatggccggtaggcatgtgacaatgttttgcaactcattagtctcgaatagctgccgcaggttggggtcgctgtggtaatgctacgggccgagttgttcacaaagtgtatgtcacgtgaccgaccattctcgagtaccgcactcccatatccggctgcatctatgtcatatgcttgcacattccggtgagaaaaatattctcctgttgcgtaaataattatcttgatctatgcacatcctgctatcaaatgaatgtagagctccttcaaatttcactttgggtgcgatattattactgcttgaggcatccaatatgtacctggtgctggtagcagggggacgtgaagtccgaaccaacagctgtttgcctctcctagttcagctgtattttcagcaagccgttgaaaagccattgagagcgagttaggacacataacggctccaaaaacgtagttaaatttccaggaaccgtaactgctgctgaagttgttgtgttgttgttggctggcgttagacgaacagcccccacaacacaaccagaaaataaatgcaaaaaatcaaatcaaaattcagattagggaaacctacagcaagcagcatcggcgatggaaaaatacagctggacatgtccatctgagtggtgaaattgtcgtgtcgccatgtccattgacggggcaaatctccctttttgtctggtgtccgcagacggctgcaacatcgaacactgcatctctattcttgtgcatcacatcttctgttccatcttcccctgaaaccaggacattttcttgattgtcagaacaatgatgaatctccggtcagatcctaaagtgacactagtcgagatgacgacaatagcaccgttcctgctgccattgttatccaggcacatggcgtgcgtgcatttttcgaaataatagaagtgagtacagaaggaacaaacgaccgtggacactgtagtgaaaatagtaatgaattaatggatacagcaatgacgatagcaaggctacatgaaaatagtaaaatggtaaaatagtaatgaaaatataaatgaaataagtaaaccagtaaaaaggaaagaaaatgggaacgaaaatggtaaaattgtgatactaaccaaaacagtaaaaatgtatcgagaaatagtattgaaaagcaaaagacgaaaagtcaaagaatgaaaaagtgaaaaatccttatgaatacagcaaaacgtaaataaagatataataactcgagaaagcttgtaatcttggtatctcgtttccatctacatcacatcttttgtaagaaaatggagtacttgcatatggaatctgtttatttagtatatactgttaaaacccccagctatgtctctaaagatcctcacccaaactgtcgatactgactatttcacctggcttgaaaggtggcattcccaaatatggacatccatcacatctgaaggcatcacccaatgcacatgacccacagccaccagtcttaccttcaacagtaaagtcgatttcagccaagtcttcgtccttgaacttcacgggttgtctcttcaacctttcctcgatcttgatggcttcaagagtagctgactgcgccatcttgcccaatatagaatcctgtaacgatctctgttgtgcctcttcctgttcttcgatttccttcaatccacaggtacagtctttgcatgcctttcttcttttcttgccgttgggaatctcacagctcttgggtattatcaaacgcgatctcaagtctagttggtttgaatctttgattaagtcgtcttcgttgattatgtcgtcgttttcatcttcttcgttttcactatccgagtcgctgaaatacgtcaacttcgcagcatccaacttgcgcttcatcacgttggcctcgtctgtttcttcgtctgtattggcagcagaagaatcagttaaaccaatagggctgctgctgttattgttgttgttgctattactctcactaagtggagatgttacagacaacttcttgaacaatggcaacgccgtggttccactggatgctgaaacggacgcatcagtcttctttccttttcttctaagaggaatggacacggattcgatcggcttaggcttaatccagcactggtcgttagtatcactaacaataaagccggtcatcaagacatctagagcctgatctgtaggtaaatctccactaaattcaccttcatctatcaaagtttcgtacaccaacttcatcaacagcgctgggatacttctgttgtggacattagggtttatgtatatgatcttgtcgtaggtatttctggtcaactctacttctcctcgcgtgactctgtctatgatatgctgttctacgtgtgcgtcgccaacagacttccgtatgtcagctttaacgttttcgaccaagtgttggtcggtcacgaccgtaggatgcaaaagaaggagaatatttgccatttttgctgacttttctaatatgaacacgaactttaaagtgaaaagtatttatctagttgattattaatgattgcgcaaggtaacaaagtcaagggagaacacaaagagcactttccaaacttctgacaaacgtaaacctcctatatgataccgtctctataatttctagagaaatttccaaacctgaacagaataaactgagcccttactgaagcaaaagaaatgttcagcatctgaagaatttctcagttttataagcaattcttctacagtcagccaacacttttttcttcttggtctgcgggaacatcacgtgctctgcccttatatggatatcttttccttagtaagtgcggtaggcccacgactggatgattcacccaatgctggcccggtatttggtcagcggtgactcagctgagcgccggaagcggccgtttttatggtttactcaaaaactaaaatctggggtaaaaccgagagcaatcgattgggtgcttatggacagaatgaaggactgctacgtttgctgaattgttcgtgagatcagcgtgttgttattcagctatttgtcttttgctctgtatattcttctctcgttatctcttcttctctcattatctcttcttttctcttattactgtgctctaaaacataaatcacactcttctacatacaaatatctctctcataacgagcttctcttagaattactcgttatctgtgttaactttctcggtctcaatctcatctgcttcatttcttctccaacttcgatggatatgtgaccgggccatcttcgacaacttgatactctctttcacggtatgtttctctttaaacacaacctcgatttcctctaaggtcaaagcacaagtttcaacgaagaaaaagtagatgatggcaaactggaaagcatcccaaaagacaaaaaacacatagtaccaatacttgatattctgcatggccaccggcgccgaatacaagttgacaaacgaggcgacgttacttatgaaaaagtacaaagccattcctctgcctctcatgtcattggacattacttcggccgggtaaatgggctgcaatggagtgaatgcaaaggaaaagaagattgtcatgaacaaatacataaaggcaatgccggcagatgcggctgtatggttgtttgcatctgcttggaaagctctaacagctgcggccaaccctgcaaaacaaataacaaacccagcattggcatacaagagaacccatcttctaggtagacggtcaataagcaaacctccacatgttgcaaaaatatagcagagaattgagttgatgcctgtcaagagcaatcttgttgtggcatttttaattcctaaagttaagaacaaggtagtcatatagtatgtgatcacctggttgccactgaattggttgaaccaagaccaggccacaactaatgctgttctcttgcgattggaagtggtacggaaaaaattactatagttaaggtaatcctttggtttcaagaacccatttgttcgaaacgacaactccaactcttccatctctgcagcaacaatcggatgcgaaacatcaccattagcatggtactttataatgaagtccctcgctgtttcgatcttgttcttgccataatagtatctgggagagtctccaaatcccaatagagcactcagacagataagaacaagagccataccaggacagaggatctgtagccacaagccaattttgaaagtttggggaccttcgaagtttttacttgtgccgtacattgtccatgtagcaatgatacttccaatgtagtagaatgtattgaaacagcccaccaaccatctcatatcatatggaacagactctgtcaatagaattgcagctgtacaattagcaattgtggagaagaaacttagaagaaatctcccaccgatataagcactatgattatgggtagagcttacaactattgagcccacaatagtcccaaccaagccaatgattatagttagcactctgccgatataatcacccaaccaaatgaagattgtggcacaaatagcaccagctggaaaaatcaggaacaccaaaccagtatcgctggccgagttgctgagattgaagtacgttctgtaagctggaagtgtttctatagcagtttgcaaacttccgtcatagccattcatggttgagcaaagatataaaccagcacatatcgtatacaacaaccatctacaccgtgcaaaggattgaaccgggtggtgtttaagtatctgcttgattgaaacgtcaggattgacgagtaattcgttttttgcaatggtatactttgatttctcaccgatgtccactgtattgatcccgtttctctcgttatcattgctatttataatacaaattttgttatcgtcagcaccattgctcatattaatattgctagaagggtcgtaaatttcggttatttcgaaactatcgtcatttatattgtgatcgtggccctgctccagatgtctggattcttgctctttgaattcagacgaggtcgtagagctgttcatttcaactaattcttgactatagaacaattgtaggtcaaattttacactaagcttatggcactacacgtacacagcttctatatatggtatctgtcgtacaacactgcctatttcagtatgtcacccatgcccgagtggggatagtatcacacggccaacagcttagtaagggctgaacaaagccgagatcagaaacttcagcagaaacggaaagaattagctccaagaaataaaagcataatgctaaattactcaggagaaggttggggaacaaagaaataaactatttacttgaaaattaaatccataaataaatgatgccatgtctgctagctttcatgtcgtataattctgagtttccccggattttccatatatttttcagataaggaacgctcgtgataatccttgaattgtgccagcaaattacactggatttcaatgttctatactgataatagcaacttcgtttatacaacaatgttctatgttgctcagggatttttctcaacggtacctcctactttttttcatgaaaattgatttgtataacttaaatactatttaaggaaactcgcttccgttgattacttcatgttacattttttacttgactaatttcacatttatattcgctactgcttctcagctcttcctatctagtcaattgttctgtccactcttggcacctctcccttgttgccttgtcactttccattaaattcctcgcacctagatcttaatccagatcccgtccttctcggacgactatactgaaacaggatggttttagaatccaaaatttgaacggaactgaaactacatatttctataccacaaaatttctacccaagatgcccatagtgcttaacaattggaagttcagagagtgtctggagggtaacggagacaatagtccctggtaccctgctagatcggataccattggcaaccaagtacatttggatctcttgtacaatggactcattccagatccgttcatagatgatcacgaaaaaaatgtacagtgggtgggaaggacaaattgggagtattgctccgtttttcagaatagcgattgttttcgtcttctcgtaattgaaggtttggacactttcgctaaagtctatgtcaatgaccagctagtgttagagtcggctaacctgttcagaaaatacgttttggatattggtgcctgtctaaattccagtgccaatattttaagaatcgctttcaccagcagtctacatgaaggaagacgtctcgaaaggattcacggactctcgccatgttggaatggagaaacgctgcggctccatgttcgaaaacctcagtaccattatggctgggattggggtcctatgttgcttacttgcggaccttggaaaccaattagtttggtctcaggaacatatgttaaagatttctttgtcaggtacctgttaaacaaagacttgactctggtagaccttctgatagaagtagatttggatctagcagacaacgacaaaggcactgatttggaggtatctattattgacccaaacgggcaattggtatatgtctacgaagtcagcgacattaaaatgttcaatcgactacattatacaatagatatgccccatttgtggaacccaaggggccatggacaacaggctctatacacttttgagctcaaagtcaattctttaaagcttgcaacaaggagggctggcttcagaaaagtacaacttgttcaagacaaagacactattggtagaacattctacttcaaaatcaataataaacctatctttgtaatgggatccaactggattccggcccattcctttacttccattttgacttgcgaagactatcgaaaatggctacaactagccatcgatggaaaccacaatcttgtaagggtgtggggtggaggtatctatgagtctgactccttctattctatatgtgatgaacaaggaatccttgtatggcaggatctcatgtttgcctgtgggatgtacccagcttattcggagtttgtggacaacgtcaaggaggaattgacggaccaattaaaacgactaagacagtattcttcaatagttatcatagcaggaaacaatgaagattatcaagtagctgaggcaaacgggtttgagtttggaatagataaaccctatgacaaatttcctgctagacttctttatgaagaagttttcccagagattgtgagtagattaacaaatgatgttccatatattagaagctcgccgtattctgatgctcttactaaaacgagagataccacaattggtgatttgcaccaatgggatgtttggcatgggaatcaagagccatatcagaactgggataagctcagtggtaggtttgtatctgagtttggaatgctctcatttcccagtcttcaaactctcgacaaggctattaccaagaaggaagagctataccctgagtcgtacttggtggaataccacaacaaagctggagggtcagagcgaaggttagccacgtatgtcctagagaattttgcattgccttctaaatttgatttggatcattggcaatatattacccaagtgatgcaagcagattgcctaagcctagcgtaccgtaactggagacgtaaatggaataactatgaatgcggaggagcagtagtgtggcaacttaacgactgctggccggctaccagttggtccatagtcgactttcacaagactcccaaacttgcgtattacagcatcaagcgtgaatgtgccccaattggaattgcatgtcgacgcaataaagtccgaatccgggatccagaagagcctgaggacttatccgaacaaacacctttgcatgacttttccaattacaagtacagtttagacatctgggcatttagcaacagagaacaggacaatgtttcattgtctgttctgttttatagcagcgatacaggtgaactacagctgacaatcacgaaatctggcatttatttgaagaataatgagatttgcaatatcttgaacaagcacaactctgaatcgctagatggaagcactattgttcaggcagttcttaagaatgacaagggcgagataatacatcgaagtagcgactggccgcagcccatcaagcacctcaactggaagatgtacaatgaggatttaagacttggttacaaggttatgcaaggcaaaataaagttttcgacaaacaagcctgtcaagtctgtctgcataagcatgcggaacatggatatgcatgtgtttagcgacaatggtatcgacttgtttcctaatgataatcaggaggtggaaatagaaggacttgagcccgatgatctgacaatacgaatacagcacttgaaatagtatatccacatactctaattcgtgtaacgaagtctgagattacgaaaggaaacatacatgcaatgaaataagagagatgcaaacaatagcgtgcaagatagaaagatcacattgtgtgtttattgcttgagacaacaatcagattaatagctgttggacgattacaatagtttacaatagtttacaagaatattattagattgtggatattgaattacaataaaagattagaagtacattgatactacaataagatcgtgctctcaagtaatggtaatctgaattcatttgtatttcagatccttatctggaggaggcaacttccggttgccaacaccatgcctgtgcattgcagcatccggactaaatacgattgttcattgcaggcacttctcggcgttgacatccatgcttaagcgattcccattaagaaagggacatgagtatatgaggcggagacatgaataaactttgaagtgtattattggtggaatatttcctttctggatgaccgctttgtacggtacggaacatctgccatcccgaatttgtgtaagaacgtaaacgatatatttataaatacatagttacgaataattgcaagagacgacgagtcgaaagaagtgaaaggatcgttgtgttcttaatagtatggtacagcaccgacgtgatgagtcaaatgaaagaagagtattggaatacaataaaatcgtatcaaatttgaaaaattagatcaaatgtaatgaaaacagacctaacaacacgacataaatatgcttagtaaaggaaagttcatcattcgtcattcacctcatttccacttttcagtagtaaaaatataattcgtcacttcatttgtttcatttcatatttcatcgtctgtcacatcttcatctatatcagtggcatctgagtctatggcattgccaatgttctgtcctgttggtactctcttcttcttcttctgttcattcaccaaactggtgatgggcggaagaataggcataggcaggggaagggggttctgtggactctgaactatcaccagtgacgatctggaagatccaggcgaagaaacagatgtggttgtattgttgttattaaggctgtggttcctactgtggccaaatttgatggattgtggtgatgacaacgacatgagtgacaatacagcgtcctgttcgttagttttacgagtctctttagcttcaaacgaaggtaaccctgatccgtagggttctcctctgatatcactccctagagctatgtttagaggaggcaattttaccgactgctgttgactaggagttgtgggctgttgctgttgaagaattaaagttgatccttcatcattcgccgtgactatagaagatctgcgtttagttcccagcgaaaaagaagatctggacttacgcctctgcctcgacaaagccgctaacaaggcattgtgggcactggactcttcatccggcgaaggcatatttaggtagggtctattttccaaatcattatgcaaaaaaggggactgtttcaagggagaatttgagttggaggaaacaaatgatgaaggttgtaccaaatgaggtgaggtagtgttcttgggaagaggcgattgttgtaacgtctggagatttagattggctctttggagagaatttgatggcgaccatacttttttgtcagactccggcttcagcttctttgtcggcgacgtttctgagtcaaacgacaattctgtaaaagtgatgtgatttcttgaagcagatgaatcgtcccgttgcaacttgcccaatgcagaactcaatcgtgttttgagctgcagcgttatctctgtgagatcttccttattgggactaccatcttcattctggaacaacttcttggctggggaaaagtactgtggagtcttctggagtttcagacgcctttcagcagaatcatagccagtatgtctgggtgtcttcaacaagtttgcagagctgtagggtgaggtcacgttattgtggtttaacttatagtcaggcagtttgtaagagcctgaatttgtacgtttcaaggatggtgaaaacggaacttccagggtcggttctggcgttttcaagtagcttgctgagatcctatgaagcgagttgtctcccgacgatgatggaggaggcgtcgacggtctgatgctgtttttgtctgtgacttttggtgaagacaacggtgtagttggtttacctgtgctcattgtgaagaatgggagtatagctatgaacgaaaataaaagtttttatataacaaatacgaaatcgtccagaatgaattttggtattgaccagtttcaattgaagtatcgatatggagatgttgtgaagttgttaaacttatagtgttataatgtatgaaatatgatagtgacgaacttatcttgtctatcaagaagcgactcctgatacagttatacagtctttgatgagattcttataaagacactcttgaaatgatataattttctaatggtgatagtattagaatagtcctatctcgatgagtgttaaatataataacacacgttggcaacgaatgtagaatgatgctttacagcttttttcagtaacgtacaaacaaaaacctcttgttttttttctctgagcggtctaacagaactgtcaatgacttttgacgacgctattgtttggctcagaagcgtactaatgatatctctggactatcactcacttcagctatagcatacacagaaagaaaggcttggttagggaaacgcgtaagactcaacacgcgaatagaaccaaaggaaaaccaacagaatttgcaacgtcaacaaagaatcaacgtttctgcgaatggagaaagtaatagaagtacacttaaagaactaacagtactaaggcattatcttcattctggtttccagacaacaccaaatttcatattgagggcggtcgtgcgcgcgcacaaaacacatacagtagaaaaaaacataaacatcaccaaacaataaaaacagtcccgcaacctccagcttgaccattacccagactccacgcctcggacacgtatcacgaccgcatttttgcacgagctagtttatgaacaaacggttgtttgtgtgagaaaaaggacacaattgggaaactcatagaccgagatatcgctatctgttttctacatagtacaataagtgtacagaacagacaacaaaatagccattgacctgatacctgttgcgattccagcatcaatacagagtatatatatttggcgatagacgtgtaactgagaggagaaaaattgcttcaagcaaattgaaatattgccttatctcagctacgacatagaagccatactgataagcgacataagatcgtacatggtgctgataaaaataacatcatttagaaagaatatcgttgaatcatagatatcagtatcactttcgttgctttactcgttctgttacagtattgatacaatcgtattcagtatcgtttatgacgtattattgaaattattatcattatcaacatcatattcattacattagtggtaacattactttcgtatcatagaccatactacattcattccattcacatccattcagtaccaatatgtctgctccgccttcgtcgcttctccggaagtcatcaggaaaatcactctcgatgggctcagccacaagatcgtcgcatctcggctccagaaatatcttggatgccatcgtagccaatgcaaactcgtcgtcagcggctgcaaagaggcgatcgttgctttccacaccagcgtcgacaaacagaagacggcagagtcaatcgtcgcaacaattgcatcctccttcatctcaaggatctcaacaaactcctcgacctcaacaacagcaagtaccgagtctgcaattgcaattacaatcgcaaatacctattcaaacacaacagacaccttctcagaatactccaacactgcagaccctccatgtggaccaaagaccgttgcgagacaagaactatcagacacttatccagcaagaaatctacgattttcttgtaaccaacaagtttgagctcgagatgaaccacaccatcacacttaaaacacttaggctgccaacacaaaaagattttgtgaccatattcaagttcttgtacaacaaaatagatccgtactaccagtttatgcggtcaaacgagttggaaatcttctcgttattgaagtcattgaattacccgtacttagattctatcaaccggtcacaaatcggagcggtaggagcgcagaattggccgtcatttttagggattctctactggttgatcaaattgaatctttccatagtcaatttcgatatagacgattcgttgatcagtcctggtgatgaattcgaccgaatcttcatcaaatacattcgagactcgtaccaggcgttcatcaatgaaagagatgactactccgatttctacaatgaaatgaagcttcagtttgagaagttgaatacaaacttgaacaacgatatcagtagcctagacgaagaaaaccagcgattgcgagcccaatatgaagatataaataatcagttgcttgaattgcagcaagcagaaaagaagtcgcttgcgctagaagaagatcttgtcaaattcaaggcatatattgaaaccatggaatctcgaaagtccaagtgggctgagattatcgacaagataaacgacgaaatcaagaatggcgaaacagaacttgcggatttcaacaccatgaaggatcagtatgaaaccaagatattaagtcaaggcataactatcaacgatatcaataacttgaatattgaacgagacaagttgtcaaagtcaattgacatgacaactgacagattggaagacacccgcgcgaaagtagctgacagagaaattgagttggtaaagaaccatcaaagtctagaaaactttgtcaaacaatacaacaatctcattcagaaaatcaagtcgcccagctacgactttgaaatcaagctaaatgagtccattttgacagtatctactgagtccaacatcaactcggaagtctcattcaagtctgatcagataatagacaagattttgaaggatgagaagatcgagttgcttaagtacagagctagcatcaactccaaggttcatcagtaccaagatgagcagatcaaggttcaggagcaatatgatttgattaacgagaaaattctggaacaacaggagtatcttgatgagttgggtagtaagctcacagctagcaagatgaactacgatgaaatttacgagacaatgatcaatgactcaacgacttactctacccagatcgagaagttggaacgagaattgagagctatcaaaatcaacaccaatcagggttttatagagttagagaaccagtaccagaatacgttgatcgagcatgaggaaatcacccacaatatctccagagccagaaaggagttgtacgacaagtgttgcaagatgtcgcagtttatagccagtttcaagttccatatccagactaatttgttggaattggacgaccttacgacgatagagcttgataatgaaaaggagagtttgcgcaaagaggaacacgaaaatcacaaggaagttgatgttgatagagacgacattgacgaaaatgacagcaatcctgccgaatagaatagggattgtgttttactatgtactatataaagtctgtaacattactattggttatcaagaaagcgtagagcagagataaaacagttcatacataacaagtatagaagaaaaaatgaagatatggaataaagtatagagtagctacaaatggttatgctattttagtcacgtgaatttctcaaaaaaaatcaatatttacatttcagtatgcttgtatgcttttttagttcgactactttcttctttttatcacaccaagatgagtgatttcaatatatatgtcactacgagcttgacttcctctgagagaagaatctcgcctcagtgggatttacactacctcaagtccagattggagttgattactggcataccacctcagtaccaaactatagtgtgttatcctacggctaattccaacgatacgcgtaaattggcggctgccgaagagtatgatgaagaaaaggataagttggtgacagttgcagagcttggattagctccattcagccgtttggaagttgtagatgccaatcctgacctggaactacatgacttggctaacgaaatggacgaagacaccattgatcctgacaaggagttcaagttatcggaagaaaaatactctctgatgtccaatacagttctcagctggaaacagcgcaaccaattgggtcgttttgatcctacgtacgactcggaaaaggcaagagcgtatgaagaaaatgctgctttggctgcaaaaatgtcagttggacaacgttgtcgagttatcaacattgcaggagaaagaagaggtcttgtcaagtttgtcggaacgatcgacgtgctagacaagggcgaaaatgtgtgggttggcattgaatttgatgagcctgtgggcaagaacagcggagttattgacggagttcggattttccagtgtcgtccatctcatggaagttttgttaaacccaagcaggtggaagtaggcgactttcccgagcttgatctcttcgaaagcgacgatgaagacgaagaattgtaggagacagccttaaaaaagctgttcatggtgagttttcaattattttcagccagtttttaaacctaacttcacatatctatatctctggcctctccattactactgtaccttttttcccgaatcacctacctcgagaatcaccattgtactctcttcttccagaacttacaaatgctctactatcggctctaatggttggcctgtatataaattcggcgacctgagggaattacaaagctaaacaagatggataaatcgaagtgaataacgaacaaatcctccactttttcttttacaaaacttaagagacgtttgaagttgtaaatactcttgttgagttttgtattagtgcaatgtttgagttcatttttgaatttgtagatcgtgagattttcatcaaatactttcgtctcatagtttttgtctgtgcctacttgatcatcagacagtactacaccaagtatgctaccaacaaattggccaaaaaacagtttgacgacgatgaaagagaattggccttgaagccggagaaggaaaagaaacaaaaggaagagttgcagaagaaattagacactgaggctaagacctttggctggggaaagaaaacaagaaagactgttaagcatactgaggctattttaaccgaagctgcagaagagttgaggcagagaaatcaaactttctacaatgctgctgaagatcatgatattgaagatttgttggaagattagaaaatgatcgacataatggaaaaaacattaaattgaaaaatcgaataaccgaataatcgaagatttaaaaaactgaaaaagttatagaaatcgtgaacagtacatcacgacataatcctatagcggtatatagccaatagacaatgtactcagcactagtatagtagtcttcgattaagagaacagaattttggtagtatatggattttgtcatgtgaccagtttcgcctgacagatggcatcgagaaaaaaatctggtttcggaatttttcagctacagctataattttagaatcgtacacctccaacagatattttataatcattccattttcacacacagacgccatggctggagatccattcttgtcagatccactgcggaaaagaaaacgttctaccaaacttaccagtcgagtgaataagtccagtcgaaattctacacctagtaacaataatagatacccagaaaatgatgaggaaatcagtggagatagcgacactgatgaggaaataaatgagcaagttgatgaggagattgatgacgatgttatgtcatctgatgaagagtttgctgacgaaaatgccacagaaaaaagaagaagattggccaaacaatatttggaaaacttgaaaaatgatgaaggtcaggaccaggacttcgatgcccaagacctagacgacgatattgtttcacgtagattgcaggtagatgtggccgaaagcaaaggttatgtttacaaattcgtaggcaacaagattctgtctcagatcgacgacaacatccagatcatcaccacgagaataggtctgaagaacttgaccagtttggctgtacgttatccaagcttgtatactgtctccaaagattctgagttgatcaagtgggacatctctgtggagaacaaaaagcccgtgagaataagacacgtgaaaggaggacacaaatacttcaacgtgaatacatcaaatgtcagtctcaatcaccactgggaccagatcaactgtgtggcggcttcttcagatggcaagtatgtagtaactggaggcaacgatgctcgtttgatcatttggtcctctgagaacttggcatgtttaaaagttttggaaactagagtcgctgtcaactccatcactttccgtagaaactcggaccagttgtatgctgcctgtgcagatttaaaaatcagaacatactccatcaaccagtttactcagctagaagttctctatgggcatcaagacaacatttccgatatttcagccttggctagagaaacttgtgtatctgtagggtctcgtgacaagacggcgatgttctggaaaatcgctgaggagtcccgtctcacattcagagctggagattcactggataagaagaagaaaagggctaaaaagacggaagaaccagttgaacctgtagaagaggcggctttccataatgaaggatctgtggaggtagtgtcgatggctgatgagtctcactttgtcacaggatcagataatgggaatgttgctttatggtctttagccaaaaagaaagcattatttactcagcgattggctcatggcttacagccccaattcttaccctctgaagcttctgctgaaacatctgtagaagtggctagtcgtcaagtaccagaacgacttccctactggatcacagcagttcacagtgtaccatatagtgatgttttttttacaggctctttcgacggaactgtaagagcatggaagctcgacaacgaccggttgaattcgttccaattgcttggtgaaattgccaacgtcaatggatgtgtggtgaaaattgattcagccgagattcctgaactcaagaaattggctgtgtatgttcttgtctctaaagaacacaagtttggaagatggttgggcaagctcaagggaggcagaaatgctttgctcagcttcacttttgatatctaacatcattaatctgaactttgatatcttcttcactcagtatctaagcctaaacattaaattagcatagaccgtcatatcgacagtctccttctgtacagttatatagaatcgcattcgtcatattctacagcattcatcaatataatgattatattaataatatacatgggcagtagagtctatatacaatggcattactgaagagcttactggtactacttcccttctgcttaagttctacatctgagctgcattcttttcttttcttaaaaggctgcctcttcgtctccgccagcgtccataccatcgtcgtctccatcatcaaagtacttttcggcattatagtcgtcgtcctcgtcttcatcaaactcgtcgtctatatcctcctcgatttcatcagcatcgtcctctttattttcatttccatcgtccaattcttcggccatacttttcaacttttcaagcatggagttggccatgtctgcttcatcaccattactactggagatgttatattcagccaaacctccattagacttaaacgtggaaagtgacaaaagcttcttcttctgtttgttgcttattcccatcaccgaataaagctcatcgggaaagaattcaagctgatacggatgctcttcgatggttctgcctatcttcttcgccttcttgtacttgtctgaatatcgctgtatgccatcgggagcagtattgctcaaggtatgatcccctttcgagtctatcttattcatgtcttgtaagctacctgtgtaaaacggtccgtcagacatcaaatttgcaaacgaaatcgactgtttggctgccaactcttcgctttctttcacggggccattcacaggaagtactagttgtggcttctcggtgccatgatctgtgttgagaacatcgctgtagtcgagtccaaatggtagcaatgctttgccggcatttctgttccggaaagacatcgtataactccctgtctgttaataaatatgtgtggtttttctgatctccaagggtgaggaaccgattctctagctttagttgtagaaaaaattccgtttgattttagggtgatgaatcatgtgtggtaggtcatgtgatgcgatgagatgattggtagaaaagaaagacagtttttgttaccataggtttctgctgatttctaattttaagataatatcaatagaatggagtagatattgaattccattaggattatataagttgtagttctgtattattgttctttttgtgaacctactgttctttctttatcgaatcttcgacattattgcaacttgcgacattatattatttttatgtctctataatgtctccatacataagcgtctaaagacaatttctcaccgtgtactttgcccaaattttatctaaataattccaaacttgtatattctcttgcaaaaccattagtgatagtaggatccaagtttcgtaattactaaaaccattttttgtatgaaaactccgcttctcccagcgactctattggctatgtattttgcaatttccagatcgcgcattaaagtaaacaaaaaaatatattggtcacgtgatactccacagccattatagagaaatctggatgatgctttcggtgatcatttataaccgaagcagaaacatatcttttttccttttcaattcacgtttcggttgcgtatagaagctcctcgctagatctgtactttttcccggtccatagcttttccaatggcagattatactgttcttcccgatccggaggatgttgaagcagagcccgttttctcagccgatggaacacttttgatccacgttgaatctgctaaagacttgcctaatcgccgtaaacttgacaaacagaacccgtatgtgactcttcgtatgggtacgactgcaaaaaagaccccatccatctttcgtgggggacagaggccgacatgggatcacgatctcaagtttgagatgtcgcgagaaaggaagcccattctaataatagacgtattggacgagacaaaaaacgagcccacgcctattggacatgtagaaattgactgctcgactgttttgcatcccgacaacgaagttaatggagaatatttcttgaagggatggtatgacatgactttgaatgagcggagagctggtcaaattcttttagacttcgctttctatccgcacgctcctcttctaccacccaaaattccagcaaatcaggactatggtatgacccaaagttatgaccatggagacagccatagaagcagtaatctgtttgactctagaggtggatatctgcgtagtgccagtccccaaaaggagcttcctccatctcccaaaatgagagcgccttctgtggcagatcagattttcgtttctgaagacaacatcaagaaacagaagaagttctcgcttctgtcttcaagtatccagggcttttcgtcacatgctaatcgtgaagtctttataaacggcgcagattcaggtaagaaactgggcagatttttcgacaagttgaacaagatcaaaagcaagttcaatgtgtctcgggacgacgccaacactgtgtggttaacttcagatgctcagctcactgcagagtcttctcctagacgctcagcttcgcctatcagtttgtttggactggatgatgagaaccatgtggatagtttaggaacaccggtagttccacctcattctgtgcattccatggattccaaccaattgctgacttcagcacgtaaagagggtcactccagatcaccacaacgaaagccacctactgatctccaagacgatttccggagcttgaacctcaagaaaagcgtctcttccattcctttctccgctgattccataggtgatgattatggacatgtgccgacaaaggtatacctatgtgatgagccagtaacgcccctagacaaaaataagaatatcgacggtgatgacattgcaatcttcccaacccccagagatcatttcaccaaagaaagaaggctcaaagacggacacggagtcaaggctgaagatttcaaagtagactttagaactgagaaaacaggctatttaggcgatggacgcttttcaccgtctgtattccaaagagtagaccatttcgactatgccgaagatcttggaccaaagcctactgtccctccaaagatacccaagggattcacggctcaggagtattatgctactgatagagagagttatttgaaggatataaacggtaaaagattttagggaattaatatactaattaatttaatgacattgtactatattatactaattctgtattatgctatccttattaaataaaattcacatattgtacgatgatttacaccaacacttgaacttttgttctcgtgcttctaattacgctatacttatatttgatcttccatctattctttcacaatactactcttatactcatacttctctatgatatacttaagtagaaaagcttgcgaagttgatattgtattcgtacttcctacaaaattgtgaacagtatttatgcattgtagcagatccatcccttgagtttgaaatcggaaaaattaaagattcgttagaatggaggaacgattaacttaaccaagggtatcggatctaactagctatgacgagagaggatgtgccaaattaataataagtaataaataacaatataaagtaccttgaattgaacagacaaaaagaatgaaaacagactctgcttagaacagaagaaatatcgatcgaggaagtagttaagagggtatgaaactggagacgaagccgtgatgtcgaattggggtaagggggttgtgctgtagatcgacatccgtaacggtgaggtacttttgaaggtgatagtgactaaagtcaatctataaggacggttcctctccagtttagtaataatacagtgtataactttcagtcttagggtgacgggtatgaattttaccacaacaaagtggtggtttcgattctaccacagcaaagtggagaattcgagggaagacacatctttaacgaggaaaaaaaggaggagattcaagttcaagttagggatcacaacaacatggcagcgacaacaccaagcaaaccgacagcgaagccggcttcaccggcgagatgggcagctccagcaatggcagaggtcgttctggtggcgactggttcagcagaagtagaaagaactgaagcaggagaagaagtggcgaccacggttgtgttggcataagctttggtggtcgagatggtggtggagttgaagtagccagtgatggaagccgacgacgtgacagacgactcgctggtggaagaagtagaggtgttggtgaagttggaagaggcgacagctacgattcccttgaagttgttcaaggtaactgaagtcgaggatggctcagctgtcaaagcagccaagctggaagactcagcagcggcagcggcagcagattctgcagaagcaacggaagcaaccgaagcagcagaagcggcagcttcaacggaagcaactgaagccgaggaaacagaagctacggaggctgcagaggcagcagaggcagcagaagcagcggaagcggcagaagcagcagattcttcagaagcttcggaggcagcagaggcagcagaagcagcagaagcagctgaggcagctgaggcaacagattcggcagaagcaagagaagcagcagcaacgctgtaagactcttctggggtcaagagggtgtaagtcacggtgatggtggaagtgacagtggtgtcttctgcagctgcgaagccagcgagagcgagaagggcaacagaggcggttttggaaaacaacattgaatcagaagtttatcaagacttttcgaaaggacgataggatcgattgacgggtatcaggagaacggaagtttgtttagtttcgtgggtttgagtagaaagtgtcgagtttaatttgtagcagtgcaaataatgtaaacacaacaggatcaatctaatatttgttaaacgaaagacggaaggagtggtacgatacacgcggacggtttcgtggggtagttaaggaaagactagggttagatgaaagctttggtactcaaaaggcagtgaagaggcaaaaggaaaaaaaccttttacaagatcttgtaaaactcagaaatgggatattgaggttaatatattggctgaaaaaaaaaacattcaaatgtttaaatctgacaagtcaaaaatgcaaaaaccgaagcacgccaaaaaataccccgtttgccggcgtcattaattggtgttgcagtaaaatattgggtaatattatcgattttacgcccacaatagacgagctattactgtgtgaccaataaacgctacgttttcggagtcaagattgcggtggcctagcgtcgtctgattgtgagccacatgatatttttcatctcctggcccaaaacagcagtggtatgtctggatttgatctggccctcatggcgcgcgtggctcagacacgactctgattcccaatgcgggcgagttcacaacttggcagacgcacctcttgcccgttcgaggcggtgggtaaacaacaacatgcattggccactgcagcctgcacgcacattcgctaaccgaaacttaagagcacccgtgccgcaacgctgacaaggccgtggctccacgaatgggttcatgaggtgtgtcgcagcgtgaaaaaatacgactcggccgctacatgcagggagatctaccatttttcaggctaaattttcactctatttgctactaatttctaattctaatttgcacgctaattcgagacagtaattgggggtctaacttctgtctaaaatgacaccagtttcacctcggaggtttcatcagcactttcttcgtcgctggttttcttactttttcatgggtttcacgcctttgaacactctaattctgatcttttgtttccattcttgtttttcacactaatttttcacactaatttttctcgctaagtgatcaaattcttctcttcacaaaatcacccataccggcatcgcatcctccacgcaaacgtcatcgcacattctgactgtatggcgtagtcaagaacccgatctgactgctgcagcaatactcgcgtgaacctcgagtctgtcgtactctctgtctcagtcaagaactagtctagacctgaaaaatctgccatcctgtaatacgcctgtcttgcagaaaaactctctgaactgtctctcaactgtacagtctagactgtgaaaaagccttctcatgcctataacctgtgagtcgtctccccagcctcaaggtacaatacgttagccattttggcgtatgcacgccttggccaaagctgaagacacacaatcctctgccagccggatgaatctctcgacctaattggcacgtcgctagggcgacatcttctaaatgaaatcctgccactaatgcaatttcttctcccgatccactaattgccctacagctgacacaagagccagtctaatactactatatctcttgctacggcgtagtttcacacgcattcatcctggtatgagttgaaacatcctggctccagggctccgactccattgcagaggtatcacgcccgaattttggctcttatgcctcggtatgtggaacccccaattgttttctttttgtctccatatgagctgttcgtggtccttgaatgacttcttcgttgagaattgcatttccttgttcatagtggcacactttgaaacatgaaaatttttcgcgtcgccgcgcgtgtcgcgtattccattgtcgtgtcagaaaagttttggcgtatacaggcctctccacatactcttatccaaccaagtgagcagatgactggaatgttggttgataagagcagaaagtcaacaaaacattcctgatctcgtgatctcattcttatctatcgcatgcctggtaatttcgtctatccttgcccgtaatgctgccactatcttcttacacttgtccatcattttcgtatttataacttttcattcacacttataatacgctctcgtggctacttttcattcccttacaattctcatcgtagctgtccagtcgcagttcatggcaattccatcattcacgcctcactacattatcatcaaaaacatctatgtactaattacactgctgtattctatacatcagcctcgtcgcttctcactggaaacctgatccaggttccgcgtcgcattctagaagcccctgactccccttacgctttgaaggctgttctacgcagcgacctcttggttgagatggtcaatttcgtttagctcggcgtcggtcaacacattcttgtgcactccgttgccagtgccgttgctactagtgccattaccattgactctcacatcgacgtctatgtctatgttgcgttcattgcggttcttatcgtcttcgtcgtagaactcgttgcctggctgaactagcttatctcgcgaatagagcgagccacccttcgtatccatggcatccatctcatcttcttcgatatcaccgaagtcctccaagtcacgtggaacttcgttcatctggaccgaaggagcatgtttggtgtggtcgaggttggatatcacattcatcaaaatccggtccaagtactcgggcgagttggcgtttgtcatgttcgacgatcgcacgtccaactcgtacaacggagcatagtactcgtagtagccattgtaaggcaattccttgtcgaggataacgtcgttacagattcctgtctcaaatgcccaggttcgtgcgacatttcgtatagtgtaccctcccccaccaacaaccatcatgggtataccaaatgacttcacatagcttacacaattggcatggcctctcatagataagttgaatggacccaaacggtctcctgacaaggagtctcccccacattgtaacacaatagctgaaggctggtaccattcgatgattttactgattataggttcgaaaatggatttgtatgaggcatcgtcgatcccgtctcttagaggaatattcacagcgtgatacttaccctttccaataccaacatcgtttaagttacctgttccaggaaaaaattccccaaacttatgaaacgaacaagtcatgactcggtcatttgtgtagaaagcctcttcaactccgtcaccgtgatgaacatcagtgtcgatgtagagcactcttgggtgaacacgtaacaactcgattatgcccaaaacaatgtcgttcaaatagcaaaaacccgaagcttcagactttttggcatggtgcaaacctccagcgtagttaattgctacgtcacatgacccattatttattcgagcagctccttccatcgatccaccgcacgagatcttacagaactctcccaaaccatcgaaaacaggacagtcatcaccaacattgaagataatctgttctctttcaaacatgtgcaagttgtcaggtgttaccctgtctatgaagtctatgtattcatctgtgtggaactgcgtcaactcggtattggttgccggtcttgctctgtagatttccatcttcttgtacaactcgtagttcatgatcaacgaatgggtcatacgtattctgtggggcttcatacaatggccagttccatagaagtagttccctacgtctctgtcgtagaagtaggctactctggtctttttggactcgtccactttaagctcgtcaaacggtaaacgaacatacattttgattaaggagctatgttatctaatgtagctgcggcaaatagggagtaatggtagaatgtaataggagaaatgtatttgaattatgagattgagcaagttgaatacgatatagtgaacttcgaaaaattgtttatttctgatttttcttgtttctttatcttattgatctggatgctttcgtgttcctttcgtgttgcttccgtaatgtttccgatttttctttccagatttttccagtttttcgtttcagtttttgttttactatcttcttttcgctttcgcttttcactttttcacttcttttcgctcttgttatctttcgcaacgtcagatgtgaatttcttcttttctataggcaagaaacagttccctagtttgatactcttgtctgatattcgtagtatcttaattttaattggtgttgctagaaagaaccaattccattttgccgttttcttttctcagcttattggtttatcaggattgtttgcttgtatgcaaacctactacaactcattcttcttaaatatggaaagatcataatagcatacaacaatagcactaaacaattataaagtcaacaaaaacaccattacctcattcaaaacccatacaactacacccataactccgtctcaataaatactttccagatcaaaaaacatctcaatctacctcaaatttcacccaaatcttgcaatctcgaactaaaccaatcttcacttttcgcaacacactaccccaacccattctaagcaaccttcttcaccttaccggtcttgacgtcgtagacatatccagaaacgggaacatccaacaccaaaggactgttcttgagaaattcaacatcctccttgacactaccctccaagtcgctgaatggtaagaaggcgaaatggtccacactgtgtcccgtttccttcttgacaattcctctcaactgttcatcagagaaggttaacatcccacagtccgtatggtggacaacaacaatttctctggttcccaacaatctctgagagatgatgacacttctcaaagcgtcggaagctctaccaccagcatttcggatgacgtgagcatcaccttcgctcaagcctaaagccttggctgggtcaattctagcatccatacaaatcacgacggctaccttccttgcaggaggtaaggctaagtctcccttggtgaattggtcagcgtaatggacgttggcctgttcgaacttctgagcttcggacatattagataaggtatttgtttttttcagttacaaaaaggtcaattgaagacttccaatcgagagcaagcaagttttgcactttgaagcggctgccataatatttaggctgtctattcaagagtttaagtatatatattaaaattggggacctgaaccccctattcgtaatcgagtgatttcgtgacacatgaattgacgccatactttttcaaggggtttatacacaagtcggatggatatatgacccaatttcaggtccacaagatgatagcttagtgccgagccgattgcggcagccgaaaggtgtctcaatttggctttaaagactccctttgaaatcaaatgatttcttgtcaattgactgtgaaaaataggaagtttccaaaacgcaagtgttgcaggtcgcaggtcgcatttttagggggctttggggggctgttgcacatttactataacaacttgctgaattttattgaaccgtaatatataaatctataagtgctacgagcgctggagatggtcgggcagctagatgttcttcttgctggaccttccacattcgtcaagtttgtatatgcccaataagtatgctattcttgtgactacaagatcaatggccatttcaattgagtccttggccaagtcaaccttggatccgtcaatttcctgccagttcaccggcaactctttgatcttcatgttctgtatttcacccaaaagcaatacctccacatcaaagatccatctctcggtgtgcatgtgggggaaaatgttcttgacagcgttgtagttgaacatcttgaatccacactgtgtgtccttgacgtcacgaatgccaaagatgtacaccaaagtgtgcaatccgtacatcaagaagtttctgatgaacgatctcttgacgacagcatcagtattaaccatgtgtgcacgcgaaccaatagctacaccagcttcaccttccttcaacccatccaaataagtaatcaaattgtcgatatcagcgaacttggtggccccatcggcatctacgaacaacgagagtctacctctagagtgtaacaaaccgtgggtaacagcaccacctttgcctctgttcttggctaattcgatcactcgcatggtgtgtggcttgaggttgtactcgttggctttttctagcgcaaacttgtctgttccatcggaagagccatcgtccacgatcaaaatctcatattttccagggtatttttcattcaagtattcaaacgcttcgtccaacattttcccaagtctctttgtctcgttgtagcatgggattatgatgctcaattcgatgccattatccttgtaatccgggctcttggagtcgatccgagctggcaaatcgtataattttccagttccatcgttggtagtgtacttctgttcactggagtaggcttctctgggtgtatgggaaaaggctaccactgtcaagtagaccactacaaacacagcgactacaaacacagccaagttgatccacatcttggcctttgcagtttctggtggaaaaagtgagtggagatatggaaatttttcaacgttgattaagctatttttgaaagctatgttgatacgtgcggctcgcgtcaacattagtctcacgtgtaggaaattaattagagagggatcgcgacctagaaggaataatttaagatagtatatttctacagaatactctttgttccattcccctatattaaaaaatgtgtaaatccttctgtaggatatagtatttcactctggcaaaatctacaaattctttttttccacttcaatactaatttctatgaatataaatgtgttcgtttagaattttctctgctccaaatattttaattatgtacgttaaaactatactgagcattcgaaatgtgaaaacatgtataagaagctattaggctcaaaaataaaatatccaagaatatactaaagattatactatccggaataaaatacttctattcttaaaatatataactcttctgcacctctaatgcattacggtaatataaaggttttctacggtataatatttccaacactctagtaagcactcaacttatcatattcaattatattgcaacagtcaaaagaattagactttatcatcttctcttacattaaaacactataacaccatacacaacacagcatacattattctggctcttcttggtcttttcttcatttataatacaagtatatattacacactttcactatggaagtgccaacttggtgactctattgttcaacactcgagcattattcacaaatacctcaaccaactcttccaaccggaaggtgtctgtgcccagagtgattttgtcgatggcattgaacacctcaagcgtgtcgatttccatctccacctcgaagttgatgtcatggttggtaatcttcttgccatgcttgttcttggcctctctcggtaccaaaactctggtcaagtcaaactgggtgatggtaggagaatgggtccatgtatttctctttttttctcgcactatcgatggcttgttcttggccatgatgccctcgatgtttccttccggaacaggcaattcaagcgacaaagacaaccgcaagtcgtacatattcgacggattatggatatacatatctgcaactctggtcttttcaatcgccgtataccgtggagggttcaagctgttatctttagaaattcgaattctccgtatatgttcacctttgcctcctacctggtagatggagtcagtgatatcggtgtcaagcatattgaactttcgcctgggcctttcacgagcttgtccacgagtatcttcctggtagcttttctccaattcctcaaagaacttgcggatttcattccaggctatttcttctacttgcatgtcaaaatggacactcgaatgatccgtgaagatacactcagtaatcacactgaggttgatccggttgcccgttctcttgtctacgattttaccgaacttgagctccaactctacgtactttctgtttctttcttcgatgttggagaagttggcaaatatccattctgccatggtcctagtcaaagaaggtggaggaattactccagttatactacactgtaaatccacacttctagttgatgtatagtcgaacacgggcttgtcggaaagcgtcgtccgcacactctggccattctggttcccgatatcagagctatcgatcaaatgggctctgttaggaggaatccattcctgtgcccagataggaggaactgtgtacctttttggttttcttgattttctgagctgtttgattcttgtcaactcgtctacatcttgtttactggcggggtcgttatctttgtaggtattgccgtttttgttgttagcaacttctggtttctgattgttttgtttttcaggtttgcttacaacttcctcttttacgacttcatcgacggccgtcgctgtatttgatacctttctctgttcttctgcctttatttcttccttttcgttctcagtgactctaccactgaacttttcttccttttcttccactggtgattgattcaaactgctgaaactaagatcctgggcactagatgtgcggctgacattgatcgtagactctcttccagtggaaatgtctacatctcgatcattggtgatgttagctatcgaattactcttaatagaagttgctaaatgagctgatggagctggcaccggcttgacaaatgaagtctgacgttccggttccggaggaggatcgttcaaaatgttgacgatagagtgccgttgatggaccgattgggtctggctagttcttctagccgctgacaccggcagaatttcctgctcgtgatcgctcggaggcgaatcgttgttgagaatagagccaacgttcattactgcgccatagaatattttgatagtatattgttttttctcggtcttggggcgaattgaacacagaaaaggcttggcgatgttctcttaaatgtcagggaagagttacgatagttgaacgagaagtctctgggtgaatagcgtcaatattcaatgtgctgaggttaaaagaaacgaatatataattgaacaagaaggattaaaatgtcgccgtgagaacttcgatggcgcgacatcttgttgaagattgagatgtgcgacatattcacagccattgtttaatggaatgaaatagtagtattctaattggtgagcggatcgaaatatactgttggcacgaagattgaagttaacgaattgaataaaactcagaaattcagaatagtcattaaatcttatctttacaacaagatttgcgaaattgttctctgggtatacatacattactctctgactaaataccaaatgatcagatacttctatatttcagattagttatggtaatatccaattactcagatctgtacatccctgtcggtgcccaataataagttacactgcatacatagaaacataatactaataaatactctactctagcaaccgtttcttcaactacatctagtagcccaagttcttgttcaatctggcagcaacagcgtcaataaattcttcagtggtaacataggatgatctctcggtcttaccctgagccaaggacaagtctttggtcataatgttgtccttggaaacggtttcgattgtggcctgctccaacttttcagcaaactctgagacctctggggtcttgtccaacttacctctttggatcaagcctctggtccaggcaaagatcgatgcaatggagttggtcgaggtctccttaccctgttgatgttgtctgtagtgtctagtgacagtgccgtgggcagcttcggcttcaaaagcctttccgtcaggagtcatcaagacagaagtcatcaatcccaaagaaccaaatccctgggctacaatgtccgattgcacatcaccgtcgtaattcttcatggcgatgatgtagccacccttggacttcaacatctgggctaccatgtcgtcgattaatctatgctcgtaccagataccttcagcttcgaagagcttctggtacttggaggcatacaagccctcaaagatgtccttgaatctaccatcgtatttcttcaagatagtattcttcgtagacgaaaacaagttcaactttctctccaaagccaatctgaacgacgattcagcaaagtccgtgatagactcgtctgtgttgtacatagccaaggcgacaccagctccctggaagttgtacacggggtattcctgagcaggcgagccatcggcaggcttgaatatcaatgacacttcaccagcttgaggcacgataatgtcggtagctttgtattggtcgccgaaggcgtgtctaccaatgatgataggtttctcccattggggaacaattctggggatgttgtcaatgacaatgggctctctgaaaacagttcctcccaagatgtttctcaaggtaccgttaggcgacaaccacatcttcttcaagttgaactccttgactctggcttcgtcaggtgtgatggtggcacacttgactccgactccgtactccaagatggccttggcagcatcggtggtgactttgtcgtcagtctggtctctgtactcaattcccaaatcgtagtacttcaagtcgatgttcaagtagggcaagatcaacttgtctttaatgaactgccagatgattctggtctgttcgtccccgtccatctcgacaatggggttcttgacggtgatcttggagatggccatattgctatacgtctgttctgttggtatatacgaatctactacagataggtgaagaagaaactaagaagaaagtccgactgaaaaacttgtctgtatacaaagcagcgaatttccagcctttttatagcgaccccatttgtgcccactgccgtcaactctatttgtcagaacgtaagcatcggttcggtcctaacactaacagcccgggaactagtgccacatacaaacccgaccaaaaagggctaaaccaactaaaggttaggttccaccatcggagtgtgtataattgcccatttcggagccatctcggcagtggaacatggcgtggttataccagccggatatacagtgaaattggaccaacccgaagatgttgggacgcgacagatatggtgcaatagaattgaaccacaacggcccaccaattggcacagaatatggcaatgggaatgtctgggttccctgtaaaaaccccagatcggccctgatctaacctgaaatctttccccaagaactccagatcctacttgaaactgttctccagtttttgactagaatttacgtggccatactctaaactgttcttcgactattttcctgtctcttctatactatacaatggcttctattccagctgctggtctctaaactcctccgcattagcatatgatccgagtcgattgcctattcgaggcagttactccgaaaccacagagttccggagctgtcaacttccgctagcgataataatcccgctattctggccattatcgggttgatcttgtcttgcttcggctggctatcgcccttatcaactctggctattcaatgtctgtctggttccagactaccccagattctgctttgtgtctgcagaagcgtagcagtcagcaccaaatggcggagaacccacagtgggggacccgatggtgtgcgcacgattctgacggactttggtttctccgaaattgtccgtcgttcgcagcccggcgttcctaggaacgacaggactaaaaatggcgactgcgcaactccaatctcagtatggattcaagccagaagagacagctcagttgtttatctacttgcgcttggtagctgggttcacggatgataaaacacagctcgaagaatgtcgcatatttgtcgtagtttgtcgtacatttgtcgtacattttgtcgtattccttcagaaattgtaaggtatgtgaatctcgttttgtatggggaagcttgtaaagcctgaaaagcttgctcttcttacctaattgtatcacaatatagcccccatatcgactactctattctcgccaattttatctcgtcaatttgatctcaattgcacgtttttctggttttctccacgtctttccgtccagttctccaccatctttttcactactgccccaccacagaacattctctcctgcatggtatatgtctcgactgggtgttacgtcatagatgagatggggcataccgattattttgactagcagataagactggggtacaaattgagatggatatctgatcgtgtatccctaattctggattaaaatagataccaacggactaatagggtggctttaaacaattatccagttcattgttactctatcgctatccttctttctcgcaacatgggagtatactctggatctcgcacaagagccactctattactgttgaagctttctctcgttctacttcagctttactctttccttgtatcttcactccttccttgtactctactctgcctcgtttctttcagtctacgctcgcaatcaacgctccggttcagcgagactacgcgtaactaaaattgaatctgagtattagggtgcgtctgactaagacagatccataaataaatcagatagagatcacatacctcctatatatgctatacgtgctgtagttgtatattcaagtatatttgtcagtggcacaaagtatccgggaattgccaatcctcaatctccagcgattctggcaaatccgcttccacatctcagtcgcaaatcaaatcaccaactgctgctgatgtttcaccacctttgttattttttcttgtcatttgtttgatttttatggaactcgttctttatcctcttcttatatcagcatcttcataccagcatcttctcgtttctccatattcacccatagactgcatcatctcttccgcagtgttgttttgatttgttattgttcgcatcttcattttcgtctccggacttgtcaataaccaatctacaacccactactacaaatcgatacaagtgtcacctgttcttaatatatagcataccatactcaaaatcacattgcatcataccaatgccagatcttggtcgtccagaacgagatgccatcagaagggctgagtcatcatcttctgttttcgctcaaaatagacaccaacattctacaactactgccttgcctccgacaaacagaggacccgtcagaaccttgccaaactcgcctctagttcatgctctagaaccaaagctgtcccattcaaatttgcctcatataagatcagcaggaaaattcgatatcagatcacctataattccagaaaattcggtgctcttcactcctggaggcataaacgagggtatatcatccaatttgcatgttcacgatctggcttcttctttatacacttcgcgtaccaacgccactgtagcttccaggctcttgagtattgcagccgcgaaaaccttatacaccttacgtaactactataacgacttcacaaccatagactgggccaaagcctttatcctgacaaatagattcaattacgagttggaaaaaaacacctggatccaagatgactacgaaaccagtgaaagtacaagtggtaaaagaagaacacctattcctttctactacaagtcatacttggtgctcggtaaatgggtgcttattgtaattataggcttcgtattctcgttgattgctttcgccatcgacaagtttgagattcttcttattggcttcaaacacggctactgtaggacgaattggtttgcgagtcaggtctcatgttgtgccaattcggttgctgggccaacatcttccgaatcgtaccctctgtctatgatgtacatgaatgtattcaagctgggctacctcttgaacacccgtaacaatttggaggtttgtcctgattggatctcgtggtccgctatattctcgaaagagcctctctacaatcttttcaggttcgatttccttatttatgttgttttaacagtagtcttggctcagttggcttgtatcatcactttatcaactaaactaactggcggagtagtggtgtcgccgccaaagcaagaagacgtaactcatttgtcaacaggtaacgataagactggaacaaatgaagaacatcatgaatcttcttcttcagatgacgataacgaaaaggctgctgcccagatttctcctcgtgtcatgtactctgcttgtggatcgggggtaccagaagtcaagactatcttgtctggttttgttattcgtcgttttcttggaacatatacattgtttgctaaaacaataactcttgtacttgctattgcctcaggcatggctcttggcaaagagggcccgtatgtacatttggcaactgctgtaggtaacatcgcatcaagattcttcccgttcatcgagagcaataatttattgaaaaagcaaatattgtctgcaagtgcttcagctggcgttgcccttgcctttggctccccgttaggaggagttctctttattctcgaagaaataaatcattatttaccatcacatcacttgtttcaaatcttcttctgtgctatcatttcaacgcttttcttgaaattcttgaatccatacggaactggtaatacagttttgttcgagttgaaatacaattcagattggagcgcaattgagcttctctttttcgtaggattgggaatagcaggaggtctattcggggccagtttcgtgaaattcgttcagtggtggcccaaaaagttccgtaccaaaaagctcatcaaggaccatcccgtttttgaagtcttctgtatcgctctactaactggtttaataacgttttggaatccatatacaaaacaggctgcttcagaattggtcttagatcttgctactccttgtggcttaaaggaaatagatggttcattgtgcccagcaactcctgagcaatacatcaaagaaattggatcattgatatttgcgtttgtcgtgaaagtcatattgacctttgtcacatttggtttgaaagtaccttgtggtatttacgttccttcaatggtggcaggagcattatacggtcgtatctgtgccatgttgattcaattatttaatctcaaatacaaccttaacatcgttgacgtatcttcggtttcaactactacctcggttatgcgtttcatttgttcgtccaaatcagaccattgcgtagatatgggaatttattcgatgattagtgctggtgctttcatggcaggtgtaacaagaatgaacattacattggtcataatcttattcgaactaaccagttcctacacttatgttttgcctatttctatctcaattgctgttgcaaattgggctggtggattgttagaaaagaattctttatatgagactatgttgattatgaacgattatccattcatgtcatcagaaacagaagccatcgatccatttttaacagctggagatatcattcatgcaactgataaggtagatgaagatgttctgagagttagtagcatttctcgaatcgatgagattcctacaatagaaatcagtcgtgacttgtctgatcatgatcatgatcatgccaacagattatatttagacgtcagtgagtctccgtacgtgcctgcttccttgttgcagtctaaattcatcttattggtcgaccagggtttgttggatggttgtcttccactaatcaagaaccaagtgtgtgttggattgcttttcttttcagatttggaactttgtctagataagcttaaaggattctgtctggaatacgaagtggttgatgaaatctattgcaagctattagtctcagatggctacgaccacagaaataacgatactatcaacatgcatgaacgacataattctgctgtggttcaaaacatccaaggtggtggcaatcaaatggattatttcagttatggttcaatcgataatggggtcgattatttggtatctgaagtactagaatctttcacaaacttaactcaatatgttgactactcgcctatattcataaattacgacagcgagttgagctttgctcacttgattttcgacaagatcggcaacagagtcattgttctccttaaaaatggtcatttctacggcgttttgcataagaaagtgcttatcgactattgtagacgggtaacttgataaaattcattacatagcatatctagatctaatgtcctgataaatattccttttctctttgattgtagttgatattatagattttgcagctaacaaatgtttctgctatcaatagagtaaataattccatattgtcgataagcgttttagtgttaagggtactattgctgtacctgaattcacgatttgggtccaatttttcttttaatccggcattccttgataaacacctccaatagttatttccatctccattttgactctgacgttgcttctcgatcttacttagcatatttttgtaaaaccgataatgttggaaactgtcgcttatgacttccaagtagatttgacaacgtaataaattggttggaataagctttgcaataacactattcaatttttcgtttaattctggggggttagtaaaatatgacatcaaaaggtacaatactaacctgctgaagtagctcttttcgttgaaatgaagacccaagttgggactgttgtatttggcatggattttgtaatgtctggaggttatttccccataagacaagtgactgtcttgaataattctcataccttcaatcctaagctggtataagtttaaaggtccatcaattgactcagtttgctcacttgattccagaaggaatattgctttgacgagcggcgtgttttcttcaaggatgttgtccaacaaagtgaacaatagatccaaatcttctaaagtaacctcttttaggacttgaataagaagattatttgtgaaaagagtagaaaggtaaaagaaagctttcttgtatgaaagcatattgagtgtatgaagtattagttgggtgttgaatacactagtagtgcttaagacattattcatgacgtgcaactcaaaagagccaaagagctgtaatccccagttcttatccacctttaatagaacatcagaaaaatccagcaacaattcgacatatccaaaattatctattgtgggagggcctgtgatgctggggttagtaaatgattccatagcttgtaggttttcattatagcgcaccaacaagttgctcataaaactatagtctaacaacgaattttgcaccatccagtcatagaacactttgcattttttggagagagtgataataagcataatattctctaattgctccctatctctttcaatgaagtaaaggttgctgatgatatcaagtatgaaaaatttaagccttcgtttatcagggacctgttgttgaaaccaaatttctagcaccagaatatacttgctatagaggtctaaagttgtatgaatcaactctttcatgtagtcgactagggttttatgcatatatctgtatttggtgaagtgtttcaagtagtgttccaaagtattagctaactgccaacggacatctttctctagtacaacactctgagagtggcattgcaggacagaatcaaacatccaatcaaaaatttgttttcggacatcaaacaaatcatggcagtcgtctactagctctatatctgctaaagcataatagaatccttctcgtaacgcaaaacatagtgtatcagtattcttgaaaacttgcaactgatcgtaaacattccacaaatcggaagtgagttgaagagacgcagatttcttcgtagggggagacgcctcagaagccatctagatgtgttagtacaataaaccttttgatatcaagcattaagtgttcacatactgtttctttatacttgccaatgttcctgacagctctttcaagagtgaactgggcactttggaaggagttgtcttttccgcttttaggaacaaaagggttcatcagggacaattttttagtttgttatttcggctgtgctgtaatttggtttcttggtttatttaggatgtcggaggcactttctgaaacttggatactccgtattggtgtgaagttcggaaacaggcaataaaatatgaaaatatgaaacaaccgaagtgttgcagccattttgtggttgcaattcctgtacattggaggaaaactgaaacagcttttgtatttcgcaaccttgatgtctcagaaagctatatataatatctataattctctctatacctactattttgtcttttcaaatctttacaagtttttcaaggttgtccataatataagaattcgtagctgattaatttcatattcaatcatgtcccgagcagtctcaaagtctagaccatctacttccaatgcgaatcatgccaatagatacacgtacaataaatttggctcaagaaaggaatcggcttcaactcgagaaacagcgatagctggaagccttgaaagctccagaagttcgagagaaaatcaaaatcaaaatcataatcagaacttgaatccgaaaaagattctggcttcgagtgaaatcgactattgcaatcattacatccataccaaacagaatgcgatttctcagatcagaaacatcgccaatcccactgagggttatccgaaactaagcaagttacatcagttgaaacgagcccaggtagagaaacatgctactaccccctatggagtacgtgtagctacagacaaaattattcctactattaacagttggatcgacaactatggattgaaatttgacgttatcatgatcggggcacttgtagaaaaccagttcatattaccgctattaaattccattcctatcagtaaactttgtgctaagccaggattcttgttcatttgggctactactcagaagattatcgaacttactagtctcttgaacaacgacaatttcaacaagaagttcagaagatctgaagagttgatcttcttgcctgtagacaaggactctccgtattatcctgataactctggagactctgtttcattgttggagaaacaacaatggcactgttggatgtgtattaccggtacagttagaaggtctaccgataatcatctcatccactgcaacgtcgatacagatctacaaatcgagagtgctggtaacaaaaagaaaagctctgtacccgaggcgatgtaccgagtagcagaaaacttctcgaactccaacagaagactacacatcattccgtctaaaacgggctatgactgtcctataaaaataagaaaagggtgggtaattatgggtcccgacgtcattctcaacaacttcgatcccatgaactacagtagagaattgaatgcggcttctgtcgtacaatataatacgtatgctaatggatccaatactggagctaatgctcaatacttggttccacagactaacgaaattgaagacttgagaccaaagagtccagtttccggaggtaaaaagacgaattctacatgaataactagttgtattgctaatcattattgttagtacaattgatacaaaaaaagtgtcgatcaatatgaaagaaattgaatcctattgagatcagaggtttgatgaatgttggaaaagggttgttatcagcaccgcccgaagactctgagtgagctgagtaaggttttcatcacaacaataggactcatttcgttcaagtgaattccgaattacatacaatttaactcattgttgcaagatagattaaagaagaagtagtatagaatataattaaaaattttttcagacatcgagtaaatatgaaaaaaagagagcagggtaagttttctgtgtgcaggtgcaagaagaagtagggccgaatctatgtgaagaaaggtagcaattgcaaatttagtattggtaattatgatttgcaatgaagaagacgataactaacaccattaacattgaagctggtatcgtttaacatcggcaaatttctttcaatattattaattttagagaatatattgaagaatttctgagaaatgaggcgagaattggaaaatattaacaactgctgtaaaatctttttgactgaagttaacaagcccaaatcttgcaaaattatacctaataaatcttagaccatgctgatattcataaaagatgcttttctttaggaaatcgcctgaattacaactattttgggtctttttcaatgtcacgtgatttttaaattttatggttcacttctaaaagcacaatttcaagaaatggttgcgtggtctagttggttatggcatctgcttaacacgcagaacgtccccagttcgatcctgggcggaatcattctttttttgcatttgaaacatttgaaggagaacatccatgtgttccagttaggcagcaacaccctgcgaggagctggagtagtacactgttaccggtgaagatgcaaaaaggaaactcgcttttttttctctaacgtcaaatggagcctcacgtaggagtgggaccaaactggaagtataggtttcagcctgacacaattgaagtggattatagaaatgtgggtttagtggggaagatccgagagattggagaaatgaaacatgtgaaacaatgaagataaatttgaacatgcccgaagatagccagtacaaaatcgtgaaaatcgtggagacactgaaaagagtgagaattgtaaaaatcgtgaaaacagaagcaaagtgagttctcaatgagaaaaattacgggcagttttcaggtcgctgatgatacctacagcttaattgagacattctctacaatgtcattttacggagcttctggaagggccaggcactcatttgcatctgaacagacacaattggggccgcatacctacgggatcagtgagtgattcataccggcagataccattgtagcgaggcgagaatttagcgagattgtgtgcgactatacgagggtagcaaagccttgtataattggatgtgaatgaagaaatatggaaagcaaatgacagcattaggaagcgacggatgtgacaaggaagcagaatagcacataaacagagtagaaactacaagaggcgtagtacaagaggtgtagaattgataattagtgagtttattctgcgaacgtgaattctgtttctcgctattgtgctgctgtgactctcactaataaaaatctactcctgcgagacacaatagccagagcttgattgtctcactaaacgatactgaacgaccacagaactcagcttagaaacaccaaatcaccaccaacctcacgaggtcttccgtctttatcattctaacagctctcgctatatctttccgtaaccaccccagtctctctgtttggctggagctgctattatttctagccctcttaaagacacccatgcacgcccctctgattgcgattcgcgattttgcggaagcgcaggtttagtctttatcaggaggcttgctgtgttctctacaaatttgctacattttctcttctcgcttttctcctgccagcagtctaccgtggcagtatatgtatcgtctgacagacactcagcttcagcttcatccacatcttcattcgtcgtgtacttttctccctttacctcgtttagaatcagttctcattttgattctcaccaaacgtctgagccacgcccttgatccataaaatagagaatatattctttttagtttccactacttactcatatcatattatcatttactgttacacgatagacatcatatagcactatccatactacactaatctattttactgtcatatcacaatatagcactacatattccatataccatgccaccgtatgaactcgtactggtgctccaggaggaggtgcattccagtctcacgctacatccccagatcgccacgcttaaccagctctttctcaaatgcttgaaggagccacgctaccagtccccactcaccatcaacgagctctccaagttgttcaacagcttctaccgcgacctaaatgcccttgtcattaacatctacactcagtccaactccaccaaaaaacagttgatagcagcctctacgtacttcaacaataaccccaaggtatttgattacttgctagccattgccaactacagcacatcgtccatcaagttgctcaaacgctcagaccctgacgcgctttaccagctcagaatcttcaactactacaagttcctcatggtttttgagtccatcgaagcatcccatatcaacttactttcttccatcaatgtaggtgaagatatttcattgtatgacaaactacttcgtttcgacaataaggacatcatctaccaagagtttttagctgacaagatcgtcgcattaaaaggactagatctttcattcaaaagcttcatagacacctctgtcagtgaccaggataaaatcatttccttcatcgagaatttgactccagaagatttggcaccgatacaacagaacttgacagacttgaacacaatcaatgtcacaccatattcaaagctccaaaacatcgtccagatgcataagaacttaatcaagctctttctcaataacgacttcaaaaatagcgacatcaacaacgatcttttgcttccatctttcatatatctcatcatctacaagctccagacaaaggatttgttcctaaactttgtctacatcaagaactttgccaatctctttgacccctacaaagtcgaagtatatcctgtaaatctcaattcgtcatactatcccacagtagaaaagaactacacttctaataagtatagaatctgtaatctttacgagatgttgaatttgaacgagtctctgaaccagtcacaagaacaagagcatgtaagttcagaggagtacaaattctttgacaacgaccgagacttgatccaccacttggcacaaacgtatatgaacagcggagagttacattactacttgactaattttgaagcaattattgttttcttatcgaatatcaccatttcggagttattaaacaacaacgaaattgaagaagaacacgaccttcatcaagaacagcttaacgataattcgaacaaatacaacaacaagttattgctagcatctatattcaagttggtagatgaggaaatattggctcaattccaattcccagatgggaaattagctgaagaggccaaggctcaggaagaacaagacaagcagaacagatcaagatcttcatctcttgtgaatactatcagcaacaggatcaatgaaaccaggtcaaggtccaacagctccatcatgaacaccttgcagaagtcaaacatcttagcaaaagaaaagttccccacgttgtcagcagccacagaaggagacgacacagatgtcactggattttccatgatgaaaaacatattgggaagaataggatcagtaggatctgcgctggttcagcaattgagataccccactgatgaacaccatcagattactcatcaagatcaagaatctgatgaggtatcgctagcatcttcgaaccaaaagagatcaagtacattgttcacaaaattgtctccgaaccattcaagaacgagatcgtcctctctcgaaaacgctatgggtaataatgggtttttgaatgcgcattccacgagcaacaagaggaattctatcactgcgaagcttactaacggagtctctgagttcatgactaaattgaacactacacaaaatccttcgcagttgcagtcgtcgatcaacaagaacatctccaatagttccttacattctttggaaggtggagagacagaaagcacagcaacactacagaggagaagcgacatcaccagaagcagaactaccagtttgcaagtgatggataaatggtttaataatatcggaaccagttacgctcagcaacagcgaacacccttatctacaaacaatgaaggtgacacagacctaacagtacaattgaccagattccaccatgtcgactttgacaacttgagtgtcaaggacttgagagaactcaagggctactacgaccagatgtgcgagttgttggcaacgcaccaagtgaattctaatggaagagcagataaagcggaactgaaaaattctgagagaatgggctcgagaaatgggtccgtcgatggaattttcaagagcaataatggcaaactcaatgataaatccaatgatgagatttccaacgaaagcagcagtctttagggacttcagagtatagatttatacaataatacaagcatagcatatgagagaaattgagactatggcactatgatgtactggagtcacttttatacaaatactttgtttgaagaaatatgttaactaactgagtacgttcttaaatttccatcttaaaattgagctgcaaagctaaagatgatttgataaaaatcgagattttcacgtgactagaatatcctgcacactcaacacatacacaaatatttctagatatttccacagaagaatgacatcagaatggcatatccataaaaggtcaacagaaccccaacatactttcaatcctttcgaacattcatataaagaacatggaatgcatatgacgccggaaatatcgaagaagcgggcatctgagtctgacgatatctactcctactccagtggaaaaaggatcagactagataacctttttgacggactttctctaggtggagatagactgagtccagagcaggaaaatagcattagagaagattttgtcatcaatcccaacgtggaaacgtattccgtgtataaaaagaagatttcaaaaccgagaagtaatacttcgtcaggaatcaccagtgatttcagtagctatttagcagagaaactagttgaccatttcaacgaagagatgcttcgcaacctccaggtgatcccctggtacgactacagattcctcgtgatctataggtttgaaagatgggccgtccgtcttttcaaccgctttctccgagaattcaacaaaagaaacaacctccgaatagggcccatgcgtaattacgataaaattctcaagcttgtggaagaacagaaaatcacggctaacgacttgtttaatattctcgaccaaatgtgccatgcagaaatggcacaaatcgaaaagaggaaatggtaccggtctcagaaacaagatgaatctcactttgtagatgaagctgagatactaaaagatacacgctacgactattgggacacgcttaatatagaccgagactcagctatgctggaaaacgaaggatatcgcaatgatcttacagatctgaaggttgaagaactaccgcttgatgagcaggatatggagatggaagactggggcgatgacatcatggcagactacggttcctattatggcgaatacagagacaacaacagcgagccaatgatggcataacagacaataaaacaattggagaacaataaaatgatttggaccttgttgaattggcgttaatcatgtcgtcgttgtagagtagatggttatggtagacaacataagcacgtgacatcctccacataatacaagcttatcgcgatgattcaaaatcatcaaaatcagaactaataaccattactcttttgaatgccatacttaacataatggtttctatactaaatctaccccatgaggtgatggtgaaagtgttcaagtacttgacgccgagcgagaccagtcagatgatcaagaagttgaaatcggataaagaacaccgaggtcggcttgatgatcttgtcatacgactcttgtaccagcgtcttttcaatgggaagttgatgattatcaacgacaaatcgaacgagactattgaatacgacactatgctcactatagattcgtttgaagagcgctttttggtacataactacgagaacttgttgttccaggagataagaccaaactatgtagaggtgaaattcaccagacaggccaatgattacatgaatttcataggaaatttgtacaagttcttcagtctcttgtctcgagaggaaaatgtgcagatgctcaagtacttcgagacgaaaatcttgcaacttgacttttacactgacggaaatcttgtattgatagagaatccaacatcattatccactatcatcatcaagatattgatcagtttgtctagcaacaaggacctcttgggaaagatcaaacggttcactataaagtcgaccgatatcggaaatctttacgtttcccaatggagtcagctattccgacgttttatcaatttgcatacactagatctatccaacgacataattcactctgattatgatgattgcagagatgttttaggttattctttcaagtttccagccaggcttaagatactagtgctagataacaatgtgttgcgatatgtttcggttgcaatgattgctagtcttccacatagcctagaagtgttactgttgagccacaataaaatcgtatctgtagaaccagtacgtctatcctcaaagttaccgaatctccgctatttgaatctcgactataacggccgcttactgtttttggaccctgtcattttccggggcattaggcgagacttcagacttctgttaaggggcaccagttttgaggatgctgatttttcgcatttggcaagagcgactagcgagatcggatttaccattatagtgtaaaatgaacggatggtaatgagctaaataacgaataaatgataatatgcgataatgcacgatatttatagaaaagattaatataatgggaacatagatgtagaaagagtagaaaatcggaattgcaaaaatgtcgcaatgtcgattgtgatttttcattattaccgttccaaattaaagaagtgcgacatggaaatttgtctcacctttcaccgaattttgatgtgagacaacattctccatagttaaggagataactctagatacaccaattggctcacaacactgctattttggtgctacaagaccatatccatgattggaatacagaagctggtgtttttgcacgtgcttcagggaggaactcgttctggaataggaatatcttcattccgtccttttttagtttcccttggccgaatcggatctaaccatagcatactggcacccgccaaattttctcatacacccctaaattcgacatatttcaatagtcggagactatactcaaacaggacggctcaaaaagtaacgcagaacgagccggaattccaaaagtctgtgaaatcacaatctgaacttctacaacctcaacgagcaagtcgtgaaactgaagacaccagtgaaaattcgagcataaatgaagaaagcaatgttatttccaatttcctagaaccagcagacagctctcagacattttccacgacatctccctctccgggaaagagtctgtctttgggtaaagatataatcaagctactcaaacttgctcgccccgagtacaggctcttggcctttgcattggcgtgtttgctcatcacttctggtgtttcaatgtcgttgcctcttttcattggaaagatcattgacacagccgaagttcccacatccgaaaacgtgtctatagaagaagtgcaagtgttaggagtttcccctaatgtcccagacttaattttaggcttggaaccataccagttctacattggcttaggagtcttgtttactgttggagccgtagctaactttggtcgttcgtatcttttgcgatctgtaggcgaaaaacttgtggcccggttgaggtcgcgcttgttcctgaagattcttgcccaagactcctatttcttcgatattggacccacgaaaacgggaatgaaaaccggggacttgatttcgagaatctccagcgacacacagattattgccaaaactctcagtggcaacatcagcgacggtgccagatctttgataagtggtcttgtaggactttccatgatgtgcttcgtttcgtggaaattaactctttgcatgagtatgatttttcctccattaattgtaatgtcttggttctacggaagaaagattaaggcattgtcgcgtttaatccaggagaatattggggctatgagtaaagtcactgaggagaagttgaatggagtaaagactattcaggcattttcgcaacaaaagatgatggtccacgactacaacgtggaaatcaaagagatcttcaacaactctatccgtgaaggaaaactcgccggaatttactatgggttcaatgggtttttgggaaacatcaccatgattggtttgttggttgtcggagccaaattaatagggatgggtgagttaactataggtgacttgtccagtttcatgatgtatgctgtttatactggtagttctgtctttggattgggaaacttttacaccgaactcatgaaggggattggggcagccgatagaatctttgagttgatagactataagtctaacatcccgatccatttaggaaagaaagtcgacaatctctatggagacatcaacttccaaaatatcaacttcatatatccctccagaaaggattctactattttccgggacatgaacatgtccatcaaacaaggtcaaaatgtgtgcatcgtaggaccttcaggtagtggaaaatctacgatatcacagctattgctaagattctatgacccacagagtggtcaggttcttgtcaatggccacaacatccaagacttgaatttgaacttctacagaacgaaaattggctacgtacagcaagaaccattgttgttcagcggaacaatcaaggagaatattttgtttgggaaagaagatgccacctttgaggagatagaacaggcattgagactaagcaattcctatgcatttgtgaacaacttaccccagggcatcgagactaagattggtgcctctaccagtacacaattgagtggaggtcagaggcagcggatttcgttggctagaacgttgattcgtcgtccaaagatcttgatacttgatgaggctacttccgctttggactccatcagtgaagaaatcgtcatgaggaacctctctcacttgaacaaggaagaaggagtgacgattatttccattgcccataggttatccactattaagaacagtgagcgcatagtagtgttgaaccaagagggagagatagtagaggacggtaagtttgacagcttgattctgaatccttccagcgagttcaacaagctcttgcagagtcatagtgtcgagtagactactgattatggaaatggaattacgaagtacaacgagagacgaagaggggctttagctgcaaaaaaaaagaggcgcaactgctgataagcgaatgtcgcgttgcaaccatcaattgcaaagtgtcgcttcttcattgcgacatgaatagagggcagcatgctttgcgctacaacatcaccaccagatacatagatacataggcttttggtagattacaacttgtatatagtaatgacccaaagcaagctctagacaaggtaggaagcaggcaagaagatcataagtgggacgaggcggaagaaaatggggcgacggctgaaaagggtccgagtgtctttgccagttacgatagcgccgattctagacgttactcttcctaccagaaacaagctctacaacacaataaaggtcgatttacataataaagacgacaatgcatggtgtggttacggcgaaaatatcacatgcaagatggcttcactgtagtggttctaccagaggtaactaactgtgagatgaggtcttccctaggccagttcgataagagtgtagaagaaagagcatgtgaaatttctcatttggaaccgtctggaacgagatttcgggggtgtgttggagccaacgtcatttcaatctagacgggatgggtgaatcaatcatgtggcagtgaaattgagctgtggtggaactggtgaaacgttggggactccagcaacgctgtggtgcgcgaattgcaggttgtatcaacgagaaaatagcgagaaaaaatgtagcccgtgaacggcgctggaggcagatgtagcagacggaacagacgtagaagatgtagcaacagtgtagcagtagagattcttgcaaagactacagcacagagagaatgaatcttgtctgcaatactaaaaaacaaactttttagtgagtcccgtccaggtggtatgatcttttgattggcgtggttttggtgcctggcgttgcagccgttatattactgagcgtgcgtagagaaggttcgtacaattagcgaggattttttcctctgtcaccgagataattccgattttgctccataacgtgcgttgaaagtctcggtggaaggggaaaggttgcattatgcatgcgagtatcactctataccaggttccaggctcagtgccaggctcagcgcagaaacagagatacagtcggtcgattgtagcttataggttaaagtttataatgttagtggcgaagtagaatgggtagatcaacaatagcacatgtttacagaaccgttatttagggttgtgttgcggccagataaagttagctacagtagcgctcagatgcctggttcgcgctaaccgtacctcaaaattccatatagactactttatcgtttttacatgcagctttgctacaaaataatccgtgacacttactctgcgtaaagttaactggcccgttacatgttgaccatccgcccggatagaaaactgcattgattactgaaagagagattccaagaatagaagcgaggctaacttccctacccaagagcacctgatttccgaccaccgcaacttgcgttcaatctcctgcctgtgcatattttgtagtacaaataccgatggaatcggccgaagaaaagacgatagaaaacaagatggtcaattccataaagcaaataaaactccaccgccaaagaaagaatcccaacaagacagaagtagctgccaaacaggaagaaccggcgaaagacaaattagaagacataggtcttgagaagaacaggtttgaagctgaatctcaggaaacgcaggaagaaactcctgccaaaagccagatagaaattcaagaacaaactcaagacaaaaaccaagaagaaactggccaggtctataaggacgaacttctgcccccaagtccagaaagacccaaacatcgttcccatcgcagtgtattccgccaccttcaacatttgcccattatcagtccatcagaagccatcactaaagcttccaaatcctcttccaccatgacacaacaggaggcaatttcgtcgctatatgagaagtttgcccacgcccttattccgccatttcagggctcgctttcgtcattgtatctgaaccctgtctctgagagtgatgattcagtcgatgatatcgaagaagcgcacaatgataataacgagagcaagaaacctactactgtaaatactgaatcagaacccggaaagtctgattctccttcaaatactggatctatttctactgcggagtctgcttcaaatactgctacaaatgaccatgccgattctagtaggcccgcttccactacttccagttctacaacaattaagggagttgaaggtgtacagcgtgccgatgactacagtaagctgatcaataagagccacgagaagccacccacttccggcaagccaattagccataagagtgacaaatcgcatctcgagcatgaatctgaaggtgaagaggaggacgaagccgatgtcgcaacaggtgtacaacgatctccagcctacttgttgaacttggtggcagggtcttacatgtatgctggacttgaaagccttacaaagcttgtcaagggctacgatgatccggagatacgatcccatgtccgatcacatttacgcgcacagttacgcgcacaattaagcagccgtcttccggtatccgttaagaagatggccctgggctacggagtattcgacagcgaagacgagtccaactccgaagacaatgcgcgactgtcggaagatgaggaagcgcaagagcaccgccatcatgccctattggcccagcaacatatagaggctagctccggcactagctccggcacagctctttcatacaagcagtccaagttgtcgaaacagcctgatgtcacagaaccggcttcggacttagtagaggcaatagctccagagggtatagtagaggatgacatctccactattgccactgccactgccagtgctcctactcctactgcttcgactatcacaaatacggaaactagcactgacactaataagcctgctgctacagctactgcggcttctattgcttccattgcttctattagtacggcggggactacaaactctacttctacttccgttccgtcaactataaactctggtgataaacccgctgatgtagattataggcacttgccacaggaggcttcctcttctgaggaagatcaccatgccaataccatgtatatctcgcagtcggaaacagaacactctgatgcgggcacactagccactttcagaacagccgaagatcgttctctggcagaagatcattctctgattgaagaaaccaggctagatactgtagtagagacagctactgtaacacagctggtcaggaccagcgccgtaaataccccagattcaggcagctttttgtctggagactatcacagaacccatggcgatgagaatattctcagttctaacagtaccttggactcccagcccaaaacgactttccagcagtctatacttgataacttgaatccacagttgatcaaagaaggacttctcatgcgacccaaagaagggcagcaaacggaagctaacgaaaagtccagaacggacagattacgactcagtatagcagacaaacttcaacgagtcttcgacatcagtgacgacgactacttctacggtaactacagtgcctggttgatcagagatgtcttgcttcagggacacttatatttgactcgagattccatcttattctttgcttttttacccaaaaggtactctgtgactctggaatcagagtccaactacgacgactccaacatcgttgtccagtctggtaccttaggtttgaagacaggcaagtatggagattcgatgttcactactgtattgacccatagatactgggccgtactccgtctggaaacattgagcatctacagctcttccacagacttgtatttcccaaaggtagtcattgacttgaagacatgtattcgggcagaaatcgcagataaggacaggacagaaattgtcagaggttcgtcgccgcccagaacacctagagtgggatctggcaccgccacgcattcgcctatctcgcgtcgtggatcaggagataatagcacggatgaagagattgagatcagtaacatcttggctcaagagtccattgcagtgtccgaagacaactttgagaatgcttccaccggtgtctggatcaaactcatcaccaagaagaaaaactacaaatttttttgtgacagtttgttttcagccagacaatggtgcaacaacattaccaagttgatttttcagttgaacaactccaatgctggaaacgaagtcttgctcaagattcccattgaagatatcgtggactatgaaaagagtaaactctttgaagaagactccaaagattcaaatgtccctgaagatgaaatcccagtcagtatgagtttctcgtttaagaaggaagatcctgaaaacaagactgctaccaagtctgaactcaggaagaagttgggtgcatttgatatgagcaagaagaggtcatcatcttcagcttcgttgaattcagatggccagtcaagtcttgaccatatcttctttatgttctttagagacggccatctgttctatgaaagtctcaatgcggtcattttggaccacaagaatcgtttgaacgagcagtctgaagcactggattcatctgataagttttttgaaaaagcaaagaagatgtataagaagtcccatcatcatcgccacaatacagacacaccaaagaaattatccagaagtatttctaccttgtccacttcagaccactctaacaatattgttaaccgagtgatttcaaacaacttgcacttgctctccccacttgacgactctgctggatctcgtagatttggaattgaaagtcctcctcaaatactttctccaacgctgtcaaccaatcgtataaagaagcttggtagaactctttccaatcctgccaaattattgactatctcaagaaggtcactggaagatctggccaatagtgaaaggtcattaaatgatttggatttcatttcaagcccagatctttatgtaagtaaccagcagctcaacttccccaggccactcactatatctggtctcaagagtatgcagatgtcttttgagacttcccaaaaggatcccaacgaagcggagtctgagtttaaaaagaatgaagttaaagatttcattgatgatgaagatgaagataaatctgtgagtgacctgaaacaacttgaacctaagagatctattccgttcccaactccattgaatttgagagacccatccgaatacaatgatgtgtcaaacagacaaaataagctaatggcaattggtaaaagtatcaaggccttttccaaagttggtagtaaatggtcagcattcccagctcattttgctgaacaggatggaattgacgatgatttctttgtccaaaaccaagaagttagagaactcactgagcgtcactaccaggaacacttcagtttgaataaggaaaagaaattagtggctacttattatgcacatttgcagcggtcaattccagtatatggaaaggtctaccttggagatacagatatctgcttcagaagtttattgcctggcgtgcaaacaaagatgattttaccattgtctgaagttgtcaactgttaccgagaaaaagggttgaaattgacgtactctggtttagttatcgtcgttaatggccagcatgagttgttcttggaattcagttctcaaaaatcaagagatgactgtgaattcatgatattgtcccaattggaaaaacttcatggtggagaaacttgggcgccgagcccacatcaatggggttcaaactatgagatggagttgacaaagaccaggttaatgacaggtgttgaggatcatccgacggagttttccttcagtgaacaggacctcaagagagccagaaccagaattgaaaatgcaagaatcaagatgtttgaagataaatttaacgctgctgctggtttggacgttcctattattttggaagattcgcctttatttaagacagagatcaaaccttcgacttcttataacttcacgttattgactattggttcaagaggtgatgttcaacctttcattgctttaggcaaaggtttgatgaaagagggtcataatgttacaattgctacccatgccgaatttgaagactggatagtgaagcacggcatgaagttcaaactagtctctggtaatcctgctgagcttatgtctttgatggttactcatggatcgatgtctgttgggtttttgaaggaagcttcttctaaattcagaggttggatcaatgaattattgacatcaagttggcaagcatgtcaaggtgctgatatcctaattgaaagtcctgctgctatggcaggtgtccatattgctgaagcattgggtatcccttacttgagggcttttacgatgccatggactagaactagagcttacccacatgcttttattgttcctgatcaaaagaaaggtggatcctacaactacttgacacacgttatgtttgaaacggtattttggagaggtatctcaggacagattaacaaatggagagtgaaagaattgggtttaccaagtacaaatctattcagattgcagtcgaccaaaattccatttatgtacaatgtgtctccaaccattttcccaccagcagttgattttcccgattgggtcaaggtcactgggtactggtttttggatgaaggtgctgctgctgattacaacccacctgaagaattgatcgagttcatggagcttgccaatgaagatggaaagaaaatcgtgtatattggatttggctccattgttgtcaaggatgcaaacagcttgacaagagctattgtcgaggcagtcttggatgcggacgtaagatgtattttgaacaagggttggtctgacagactttccaagaaccagtctgagccagttgaactccctcctgaaatctatgattctggttctatcccacacgattggttatttcctagaattgatgctgcagtgcatcatggtggttctggtacaacaggggctaccctaagatgtggcttacctaccataataaagccattctttggcgaccaatttttctacgcttccagagtggaggaaattggagttggagtcgggttgaagaacttgaatgccagatctttgagtaaggccattaccaaagtaatttctgacttgaagcttattgagaggtccaagaaggtcgcagaaaagatcaaacgagaaaatggtgtaatgacagcgattgaaacgatttattcagagttagaatatgccaggaacttgattttgtccaaacaacagcacaacgagaactacagattacatatgggtacaccatctggtatccaatcgcctaatgttgaagaggacgatgagtacaccgacacagaaaaggaagaagatgaagaagactacactgacgaaagcgaggacgaaggaggagatgattacgaagctcacgaagataattttagtattaataacaacactgagattgaaatccagaggaaactggttccttcaggaagcactgatgaggaggaccttgcctctgttgcagaaagcaacttgggggaaaccattgctctgaaatttcatttcaagtagtatatagcccagatttattcagtgcagactgtggtttgctgtatatatagcttttaatgtgaaaagatttggtaaagaaaagtgtggacaagtatagaagaactatagaaagtaaactgtatataaatttaggaaaaagcagagaaatcgcttttttcttggttactgagattcggagaaagttgttgacttctttcggaggcttgatagtaatcaaacaccatacgataagacgataaaacacttcgtcaattgttactgataaatcttcccctgcatacgttgcctagttgcaaattccccaatttaagttcctgcatttcgtcttcgtatttttatcaggtgtcagatagcagtgactccagacttcaacttttggttcacgtgacttgtggcaatcgcttgactcattgaggattttccattagatgaagatagtatgggagttatttatccattataaattcatcagaagactgcagtatcatctgagcaaaccacataagcgattttcactcgtattgcatcactttctgctactttccggatccaactagcgaattaggcagtgacaccaaggaacgacttaccgtatcgggcccacccccaatttttcagttattaattctaggatccacagtttcctaaaaggcgaaacccaaaaggcgatactaatttactattgcagccagggattatttcgaacgatcaaatcgtgcacaatacaacctactgccagaaaaaagtttgactgatattttcattatatccatgttctctactagcaagcatttggtactctactgatactccacgaggtacttctattacaaaagaacaatataaatcggctcaagagtcgcatcattgatccactcacccgcattccatcatccgacccgaaccgcaaagtagaatgactacctttaacaatcaggtgtatgaagacatcactgctgagcagaaaagaacgaattcgtacgccagtctcgttcctggccagaccattgtagaaatcccctcctacacgcttgagtgtggagaggtcttgtcacgtttccctgtagcctacaagacgtggggtagattaaacgaagagaaagacaacgtcattttgatctgccatgccttgactggatcctctgatgtccaggactggtggggacccttgcttggtactggcaagacgtttgatccctcacgctacttcatcatctgcatcaatttcctcggttcaccctacggctcggcttctcctgtcagtattgacaagtctacaggtaagccgtatggaccctctttcccattggtcacagtaaaagacgacatcggtatccagaagttgatcttggactcgttgagtgtcagatcgatcgcttgtgtcattggtggatctatgggaggcatgcttgccttggagtactctgctacatacaacaagacaaactacgttaggtctataatagcgcttgccacctctgctcgagcctcagcctggtgtatctcatggaacgaaacccagagacagtgtatctttagcgatccgttctacgatgacggctattactacgagaacaatggcatcaagcctgactcggggcttagcgctgcgagaatggctgcgctcttaacgtatcgttcaagaaactcttttgaaaccagatttggccgtaagttgcccaacaagatcggctcagtcgtaactcctgtagatgacgaggaaaaaagaaagcgagatgaagaagaacagggcatcagataccctaagacaaaagacgaagagaattggttgttacacaacgaaggctccagatcgtccagatcgtcattgaacagaacttcatcgcaaagtagcatcaacatgaccagcaagccccaaacttacttcacggctcagtcgtacttgagataccaaggtaacaagtttattactcgttttgacgccaactgttacatatctataaccagaaagcttgacacccacgacatcacccgaagccgaatctcggtacaagacacggtggaagacccgttgcctagtttcttgcagagcttacaacagccacatttgattataggtatccaatcagatgggttgtttacctacggtgaacagcagctcttgggtgagaatatccctgactcgagcttgaagaagctcgactctccagaagggcatgatgccttcttgttggagttcgaattgatcaacaactactgcttgaagttcttacaagacaagttgcctgaattctacgacgtgacatctggaaagtaccagccgtttgagaactggaccgagttcgtggacagcactgacaatggaggtaactctgtgtttggtgaggctgagaagaacattaccaattggtagactaatggcatgaaaaatgtatatctgttaataagaagtaaatatctaatacatggaaataaaaagtatatatttaatactctacaagtatattgtgtagatattggttggtagcctggatttagaccattagtaatactatttctgtgtatattgccaaaaaaaagatgaaatacacaatttcaaaaatagatgaaattaatcaaaatgagcgtccgtcgacttccaatatatcaaatacaaacataactgtaacgagcagttagtatgaacacataattgagttgaattccctaccaatagacgattacaatataaaaatataataccatttttccttaactattgcggtatggatgcaaaaataacttcgcactacagcaagaaaaatagtttattggcaggaattgggtactctggccgagttggtctaaggcgccagggtaaggtcctggtctcttcggaggcgcgagttcgaatctcgcgggtatcattataacacaccagcaattccttcctaatttacctattttcctttcttttttgcattctgtgacgacatgaaggaagtgaataaagaagccactgtagtgctaccgtattcacaccatccttatacgaaaaaattgagacgactacttctatatgaatattctttttagacattgtgaattagaaccgagagaatggtgtggtacaataaatacaaaagtatatacttgttcaatgaagtaaagtaggatgaaagctataatgtattcttactatccttatgcatataccaagcgcgaaaggatttgattaaccaacaaactcacataatgacacagcacttgcttccagaggagtcctttatatggtcgttagtggattgttgtaatcttgtgttggcaacaggcttttccttcgcagctgttggattgacagcttcactagtaccattgctatttatctgagactgttgtgcctgtgaggtttctttcttctgtaattccttctgttgtttcttctccgcggtgatgacagcttcctttctcattatctgtctaacgacatcaatgaaagcttcgtcaacgttggtcttgtacatggcactggtctcgtagaatggaaccaaaccccagtcttgcgacaccttgactccgacgtctatgctcaagacacggtcttcttccaagtcgcatttgttacccacaagaaccataggcacgttatcagtgtctttaattctaagcacttgctcacgaagcgtcaacaattcttttaatgagttctcgtcagtgactgagtatactaaaaggaatcccttaccactcttgatgtagagttctcgcatggcagtgaattgggccacaccagccgtgtcgagaatctccaagtcacaggccctaccgtcgatttctatctgctttcggtacgagtcctcaatggtggggtcatagctttcgacatagacaccttgcacgaattgcacggttatggacgatttacccacaccaccggctcctaggacgacaaccttatagtctaatgggttagtatagaaatggaatgaagacaatgaaattgagatgataaagacaagagaatttatattctaaacgtgatggactcacggaaattgcaatttgttgatatttatatgcaattgctactgtggtttttagactgttgtatcatatactatgattggatcgacaatcaacacacataagatgtagacgacagacaataacagacaattgttacccacaggctaggaatcactaccacattgtcgaaaactgagaatattgacttttgaagaatattaattttgtctgaacaaagtttgatgtattttgactaattattaattgacttttctctctcgtcttgctatctcatatcacaaacgtaaacgtatacttacctctcatgacgggctgtggttataatatatatgtaacgagagtaatggacactagcggaaagtcctgggatattggatgtaaagcaaaagaagaaaaatagtctgctggcgattttggggatcgtgcaaaataatgttttgattttagattttttttgtgattttctgatcgtcttgatgttcatttttgttttttacgtgtcggttcaggaacttcaaatgccagaattgctaaaatgccgaaaacgaacatgcaccgtgacattctggattgtattttggagttgggattaccacaagaagcctgttgcttgttgcagtgaactctgaaacaaacttcagtataattaggagttctaagttctaaattctcggttctcttttctcactctcctcgctactctcgctactctcgctactacttttcgctacatttacattcccgctctcaattttactggcttaatcctgtctcacatcactattctcattttagcgagaactgcaaacacactgaagtgtatcagaacaataacgaagcattcttctcctgatgtagcaaacatatctgtcgttacaaagtaggggtttcagcgccacaatggcccaactaagaacttctcgttattctgctctcgccattcctcttattctctcgctgctctcaccgctcctaccacgatgaggcgcaccacaatatagcgatcgtggccatgtgcacagttagcgagagatgtgcactagcgagactgtgatgaagcttttgcaagatcagcagctatcctagaaattgatactcttttcaactgtgggaatcagtcacagcttcaaacttaaaacagggtccattgttcgaagcaagaatcctacaattgcttctggtggccctctgtgtcacacgagcgaaaacgcgacccaaagagtcttactcacagatccatagcgaacgcctgctaacggcaacggatgaaaaacaggatggaagtactacccttcacgtgccatagcatatacagacgcgtacttgaagatgatgatgcgtcttcttgttcagacatcctgggctgctaggtgcttgtagatttttccgcagagagaaataattctgcctaaatggttgctaaaaaagacgcgtttctgcaacctaatccgctgcagcttctgttgcagccagtgacatatcggtgcatcatgtccctgctcactactttactactctataatctttttgcacgttttcgacagaatacacccattgtatcgaacacctacaatggacaaaacaatcgaacacattcgaaaacaatcgaaattaacaaacctaatctcattaatagttcactaaactacaaaaattaacaacacactacaatggcaagatgttggggataggaccagctggagtgattgaatgaggattgatggcaatatgcgacttcgtgtagtggtatttgatgtggtcgaagtcggtggtctccttgaagccaggcaccttccaatacaattccctgacccactggtggatgtgaggataatcgtgtctgatcataccaatgttgcacttgaagtgctgaacatacacagggtcaaatctgattatggtggtgaacaaacgcacgtctgcttcggtcaaggtgttacctagcaagtacggcttgtcggccgcatggtttttcttcaagatctcctcaaccttgtccaaatgagtgaacacgtttttgacttctttgtcatacacttcctgtttggtggagaacccagacttgtacaccccattgttaatgttgtcgtagatccacgagttaatgtcgtcaatctctgtttgcaactccttagggtagatatcaatggcagctccttcctttgtggcaagctcgttgaactccaggtttaacatccggatgatttcactcgattcgttgttcacaatggtctccaactttttgtcccacaagactggaacggtgaatctgccaacataatcaggctccgccttgaagtacaactccctgatacgcttgaagttgtacaaatggtctactgttcccaaagaaacatctgtcttggggtcaattgtcttcaattcctcatcgttgatgaatctccatcccttgtcatccatatgccaatgcactactgacacagagatcacggaactcaagcccttcaacactctggtgatcaacgtcctgtgagcccaaggacacgcaaacgaaacatataaatggtaacggttagcctcggctaagaacttggaaccaggcttgttgctgataaaatctctgaacagcgaaggtcttctgtggaaagctccatctttagcagcaaacttcaatatttcgattttttcatcctaaaattgttagttttggtttgaaatacaataggattaagaatcactgaaaatttgaatacatactgaggacattttggagaattattctaactgagtaaatttaagacaaaggatcacaattgaacaataagtggatagaaccaagcaatatgttgtagaagaaaatcaattgaaccgttttgaagtctctcgccagaaaaaggacatggtaattcatttcggaattcacaactcctttatagcttcggctgtggaaggaagagggccacgaaaatatggggaaaagcgcactaccaaaatcgaggttgtagccttagtcatgaattattaacatccagagaacgctaactagaccaaattactaaagatgaagatggcgattaatcagcagagactctgaagaaataagaatatggaataggttctctaactcttcgtacattatttcaattacttcatatcttgatattgttggctggatttaaattacaagtcgtttttgtaactaacattgactagagtgagcaaaggaggaagtgtatagagaaacgaaactggctgttgaagcagagacagagccattgaattgtcatgtagagaccactttgccgagtagagattttgggatttcttacaagaatacaatgcctagtcttgcagccgtttattcacttcctggtacactacattgtcacgactctcgtacgcagccacatcgcttctttctgactttgtagtctttgaagcttcaatatgactaaagtcagatcgagttttatttcagaatttcactattcagagtctaagaggtttaacttctaagtgcactagataagtgacaaatagagatatatatttcttccaaatcttcatattactcataggcgtactagtcaagatgtacatttgaaagaattcaagtttaccaatagaaacatcgacgatggtaaggttataactcaccacttcgtaaagtcgaattgaatatggttcatcatttatgggtcggaatagccagccaacagcccatgtcaagtctctcactctacggaataccagtttaaggaaagactataaaacagcccgcccgaccttcatgtctaattgtgttgggtttaaagatatcaaaattcttgagaaaatcgactaagaccccggttaggaaatggaaagggaaattggatggctgttatgcttagggtatgagcaagtgacaattcctagaaacgtagtgaaacttttcgcagtcaactctggcaggtctcactgaaaaaaattgaacaaaaacaacaattaagctttagtactttctcttttgatgtatatatttgtagcaattgttgacttgtattcttcaattttgtacagttagttacataatggaaatttagttgtatatctttgaagtttgtatctttctttactggtattcgaatcacatcagaagagggattttgttttcagcaagctaatttttactagcccatttatgcttcggaatgtattcaagaggtccaattcatcatttacatcatcatatttaacgccacaaatgtctaattttaaacttagagattatcaggaagttgctgtaaagtccgttctcgaggccgtcgaccaaggcatcaggcgtcaagcagtggtactcgccacaggaggaggaaagactatggtgttctcctatcttattccattcataaagtcaacatcacctacacgtcacaagactttagttttagcgcatcgtgaagagctcgtcaatcatgcagcacagacgattcgtaatcttaatcctcatctcaaggtagggatagacaaggccaaacaacggatgagcgacgacgacgatgtagtcgtagcgtcagtgctgactttggtgtataataagttggcccgcttgcagagatacgacaagaatgagttcaaagccatcatcctcgacgaatgtcaccatgctgttgccaccacctggaacaaaataatagactattttgatgccacaacccctgaactgccagtgtatgttctaggattcacagcgaccatggaaagatacgatgggaagccattgggagtggtatttgacaagattgtgtttgaaagaaaccttgtagaaatgatcaagaataaagatttggcggatattaagttctccaccattgagctcgacgtagacctcaaagccatcaaagagctgaacaatgattttgacactgagagtcttgctgatgcattgacgagttcgcatactatcttgcaagtggcattggcatataaaaggctaagggaaaagttcaacttcaagtcgaccttggttttctgcatcaacatcgaccattgcagaacattatgtgctgaactacaaaagcagggaatcaatgcccaatatgtcacgggactaactaataaaacagagagagcagaaatccttgcagatttcaagagtggtgagatcgcggtgttatgcaatgttctggttttcactgagggaactgacatccctaatatcgattcacttttccttggacggccaaccaagtcacggccccttttagtccagatgataggaagggggttgcgtttacatgagaaaaagacacattgccatgtaatagacatagcttcgacaatgagcactggcattgtatctgttcctacgttgtgtggatttgaaaccgaaggaacccctgaagcgaaaaaggaaacagaagagaaagcagaggctgttgattcgttattgaaatctttggagaagatgaatcttgaagaggaaatcgccaccaaagtgaaggaagctcaactgatgatggattattggaccctaaatgtagagacggtagacgggttcacttccctagtggaacctgaaacggaacaatattcagaaaaagatgaacttcgcataataagaacaagcaatatgccgtgggttagattggaatatgacgtatggggactaccattaattagatctgaatttctcaccatgcgtcgagatcgacgagccaatggtaatgtattccatttaactttatgccaattctttcccaagcaagagttccagcacagaccttaccgaggacttaagtttgaagatcctgctgatttgatgactgttctagacttagctgagaaatactatgtcaagctgcgagggcatgatatcattcaggcgaataaatcggcctcagctgcccagatcaatttgctcaagaagatactcagcggtcaggttaacaagatatatgggaacggagaggaaataaaagagaaattaggagaggagttgtcaaaattcaaaatgaagagagcatccgacctcatatttgctcataaatataaggcatcgtcgttatgggtaagatgggagttgcagaggatgataggacctgattccaagatgaaaatcgccgtttaccacaaggttaacaacggtcatggtgatgcccaaaagggaaggggtgttcaatcacagaaaccaaaatcttcgatagcagtcacaaaagcatgggatagcggaatagagctcttaaattcgcaggtggctacaaattgagaacttcacccataatgattatgggaaaagattgcaaaatccgttatacgtcggtatatacacgacccgaaaattcgaacctcaccccaagcggctcgaatttttttgaactgtttatgttactagtgtttgttattattgcaaagcgataagcatattgcggccaacgacttctgctgaggtttagagacgttcacaattggttaattgatttggagcaaatctgcgtaaccatattgatttaattgagggccagacgttttcagtgcgattttgtcatattggttcattatagaaatattgattgtataggtgaagtggaatagacacatccgaatcagattcagaagacaacacagaggtagagatattaaatatagtaagctactgaaagattttaatattaatagattgctgagaggagatcgaaaaaatcattaaaggcgataataaccactcaagagcataacgataaaagagttgagaacgaaagatttacaggacgaagatcaaacgaagaccagcccatttattttactgatttttattgattatcattcatatcacgttatatacttgaaaaatggaaagttctagccaaaatacagaaacaactggaaaggatcaacagaaaatcctgaatctctcagatccaccaacagtaggcggaagctcaagtacggaatctgtggaacgagctaccaagttggccgaagaatatgagacaggcaatgatgacaatattagcggagtttctcaggagtttgtagcgcatgccagtgagactggtcagcttcaaagtctagaaaacgaacaaagtcattctatccaagaaactccagtagagccgcagctccaacagcaactaaaatctagcaaaaaccgacagaaacaaacaaatgaacaacgtcatgaacataatgagcaacatcgccaacatcagcaacagatttcacaacagcaacagatttcacaacagcaacagatttcacaacagcaacagctttcacaacagcaacagctttcacagcaacaacaacagcaacagctttcacagcaacaacaacagcaacagcaacagcaacaacaacaacaacagcaacagcatcatcaacaacaacatatacaacagcaacagcttccacaacagctcaataggaatgatgtttcttcattcattaatatacccagctacttgtaccccaatgccaatgtttcgttgggctacactaataacagcaataacagcagcaattcagtatcgtctaatagtaacaactactatgtgacatcgagatcaaactcaatagatccgcacaattttcagaatggaaattccatttctattgcttctgctgctacaaatgctgctgagcaagaggcgcaatcgttccagttcagaccgggaagacccaaaaagaacgacgaaattgacattaagaaattcaactccaaaactgtagctaacacgtcgcatacaagaccctttgcctgtactttcacagggtgttcttggtcttttgccagaatgtctgatttgagaagacataccaaatcacattccgagccattattccattgcccgtattggcgtaatgatcctacttgccatagaaatggaggtgctttcaataggctagatgtattgaaaagacatctccgtcttgttcattacgttaaggacaagaagcagtttacccaggattcatcaagagacgatccaggctggtgtagagcctgccagcttatgtttcccaattccaggatattcgttgaacattgcttggagtgctcgcaacagctagttccaacagagtggaagagtagctcaggaagcagcagcacttcgagctattctagacaaaagaatcctgctgtattccaacctaatccctttattcccttgccacttcctcaacaacagcaaaatcaacaacaacatcagcagcctgattacactgacaactcacaagctaatcacttgtacgagctctcaagactaagcacagaagaaaaagtagtggctgaagcttacttcttgaatgcagacagcggtcatgataacatcgacgaggaaacgggcaaaagagtaattggatacccgtctattcaagacaaaaagagacttaaatctgatggtatatagcctatctatgtagtctgacaccaatatatttgcctattagaatatgcatataccagtagtatatgtctaaatctccatatccataagtaaacacatacatatttgcaaatatattaactaatatacaatattcattataaagaatagaactatctaatcactaatatacaacattaaagctccaccaacctagatttcggcagtgtcgtctacttcctgatcaccctcggtgcttctcgtttgatcaaagaaatcgagaatagcacagttggggtgcaatatgtagatggttttgtctacacgctccgacgcaccttcttcatctggtaacagactttcgttgttgatgacactcatcaagattctatccttaaccaatctcttcaaaaccttgtaggccatctttctttccttgtagtattcttgttccgtagcaatttcgttctccttctgagtcaaataccagtttacaagctcttcagctccaagtccttctccaccagcgctgtcgtcgtcagaaaccctcttcaccaacaagttcatcattgaaacgtacttgtcgtagccaatggataccttttccttctttggtcttggggtatcctgaagctgagctggtgctccatcttcttgcaaaggctcaatgttattgtcattatcgttggatgccgagccatcattctcatcatcgtcgttaacagcttcattgtcttcttccatttcaatgtcgtccatttcaacacggataatggattgtttcaacaagtcgtatgcttctgcaacaaaacttggagtgatttcttcggtacagttagctctggctatagcttctgacaatctgatcatcgactccaactgtctgacagtgattctgtaggatgatctaccaagaccctgagcatcgtcgtctcttaattctttatatctggtgaccaagaaatctctagcttcctttgtcatctttggcttgaacgttttggcgtactttatgtatctggctaactgttcagcagagtatggagggtcgatggcttcgtctctcaacatgtgcaaatccacaatatgggaagccaattgtgtatcaattctttcattgcaatcgtccaatataacgaagaacaagtcaaatctagacatgataggagcagtcatgttcaaattggatcttaaacccaactttctgttgtatctacctccaatagggtttgctgcagccaatatggaggttctggcattcaaagtagcgtgaataccagctttggcgatggagatggtttgttgttccatagcttcgtgaatagcgacttgatcagaaatgtccatcttgtcaaactcgtcaatggcacagataccattgtcagccaacatcaaggcaccagcttcgatagtgtattcacctgtttcttcgtctctgactactgcagctgtcaaacctgctgcagaagaggctttacctgaagtatagatagctctgggagagaaaccacatacatacttcaagaactgggacttggaagtggaagggtcaccaacaatacaaatattgatatcacctctcaagttgattccatcaatggtttgcttgtgaacacctccgagcatctgcaacaatatacccttcttgactacttcgtgtccaaaaacagctggagctatcgattgcaccaacttgttgtatacatgctcgtcctttaccatttcctttaattgagacacttctgagtcgctcaacgaggtcaaaaagatctcctggtcgttggagccctgatagtctacctcggttgagtcttgctcttcaccattactgttagacttgttcaccaaagacgacacatgacaggcatggaaggcaagcttataagtgaggtccctaaccccgagggacttcaaaccagaaatagctgagctcaattctgacgaaactacacctcggttatccctgaccgattgcggcttaataccaggtaatcccaattgagatacatcgggaatcacgatttcggtaccggtgaacttacatttgtctccgggttttgctctttcgacagtttcccctcttaatatgacatcaagcgtacgaggcatggaaccagttggtatttcattggagttttcttgaattctaactctttgccaatcgataaattgcgacttggagacgttaagtgtgaaatacgactggttttcacaagaagggcacgaagtaggctcggtatacttgaacacctgctcgacaccttcaatgacggctgaacacatgtcacaagtgaaggaggctcggaacaattctggtctgacttcggaagttctggtcacagtaccagaaatcagcatcaacgatccgatcttggccgttcggatgtctctgatacgattgatagtaggtaaattgaagaaagatatctggaacactctttcgttggactggccaggtgctccagtggaagaagacgattcagagaagccaggcttgtgagacgagtcgtcatcttcagcattctgaccaacaagagacgtgtggagtagagctggcgcgtatttcttcaataaatgcctcaatcctttgagcaaaaatggatagaaacggtaatattgttccaaaatagctgtagccaacaccccgttttcctggcccaccaagtgctgatagttgacatacaacgtcgagatttcgagcgacttcatggtctcgatctgggccaagtatacacggccatcccattgaccagcgtctggagcagacatatcgtcaatttccggatccacgaactcttcgataaacagctcgaagctttctctgactttttcacctgtgacatcaacgactttgggtacagcaatctgccttctgtggccagcaacacttgccgagggtggcactgtggatatggatgggccttgggattctgagaagagaagtggctgtgaactttgtggtgtgaatgcttctctgcctatcgatgaagcgggctgcgatgaatggagaagatgagcagcatcagaaggaattcgtcctggcgacgagacgaagttggccatagttattgcgagtgagtctattacttgaacgtgagtgttgaggttgtgaaagttctggctggcaaagaaacacggttagggaaaatgggaaaatacacagaatcagaaagaaacagattactgaaaaatcagagaattgagaaactcaaacgtactgagatatttctaggactgtgcaggcttcattaatttaaattggacgcgttaatgcacattcccaatatagttaaattgctgctgctctgtacagaataattctgctgatagaaaaatctacagccgaagatttagtgctgggagtagataatttggcagttagagagcagttagagagcagttagagagcagtgaagaatacagctcaacatttctatcagctagatattatgggaccagctacaaagtatatggtaattgtatagttagtagtaagacttgagtagagaatatggctttagctatagcaaaaatttggagatgcacagcatgtggcatactacactgtcatatcagaatgtaccactagagtatagtacagaattgtattttgcagaaagtacaacatattcaagttgtagatatatctacttttgcaagactcagatgtagtataatgagatcatgatgacataagccatccgctacacttatatacactatagagtacaacactaccaccgcagaattggctacagctgtgcagtgtaagtaaactctagaataatccagtcattcttcagctcgaaatactgtccgatgtttagattaatagcccgtagagcctactctagccagccagaatgtaagtatcccattagtagaggtgtgtcctgaaaaattaaaaattttcactcatttttcaatactaaccaactagttgcacccagtttgctcaacttgcggttgggagagattctcagatgtgaaaaacatcctgatgccgataaactatatgtttcacagattcagatcgagaaatcagcatccgatggtgaaaaggtagcgaggaccgtacaagtatgttctggtttggtcaattacattcctgtggaccagatgcaaaaccgtcgtgtggtcgttttaactaacctcaaaccttcgaagatgagaggagtcaagtctgaggccatgttacttgccgcagaagagacaaatggagaatcaaccacagtagaattgataaacccaccaaaatcggcattagtaggtgctaagctcacgttcgatgggtttccttcagattcagagcctccgagattgaagcccaaggcatgggaagccatacagtcacacttgaaaactaatactaaaggagaagccatttacttggctgaagatggaactgaacacctcttgagagcactcgaatcatctgagccagcaaaatccgacaccttggtcaatgccatcataagatagaatatatttgttatctgcacataccaagagctatatatatataatcatataagtacatataatcatttatcatacaataagatatctgagttcccgtttagtccaacttggtgaatctcaagtatggcttgacttgtttgaagcttccaaacttttccttagcagcctcgttagaaactgtaggaggaatgatgacatcctggccctcggtccagtcgacgggagtagcaatgcctctcttgtcagccaattgcaaagcatcaacaactctcaatacttcagcagtgtttctaccagtagaagcagggtatgtcatggtcaatctaatctttttggctgggtcaatgacgaagacagatctgacagtgaatacaactccggattcgagattcttgaagtcatcttcagtaaccatatcatatttataagcaacttctttggtggaatcggcaatgatagggaagccaaacttttcaccaccggtgacaacttcctcgatatccttgatccattggttgtggctatcgacaccttcggtggaaagaccaatcaacttgacacctctcttatcgaattccggcttcaacttggaaaatgcacctaactcggtggtacagactggagtgaaatcagctgggtgactgaaaagaacaacccaattgtcgccgatgtagctatggaagtcaattttgccagaagtggtgttgacttcgaagtttggagcggtggagccgattctgattctgggttggtcttcttgcttgaacgaatagaaacgagttccgactatagatggtctgaaaaccggggtggctctgggaagagcagttctgacagcagcagaacgaatcaacactcttgacaacatgatgggtggttaattgagtctgaagaaagaaggagaaatcaattgcaaagatttgacaattttcatctgtcttcggcttctagatgatggttgattcgcttaactaaggggagtctgctccggtatatatgtattggcgaatttcacgtgatcccatttcaaccgtttagagcgtgcagattgcaaccatttaaataccaatatagaaatattcaatttggaaatcttaccttaaagtcatgtatagtcatacagaaatacagaaatatacagaaatatacagtcgattcttcaagtaatagtattaagatttgaaaatttatattaacaagcagttaatagtatatagtactcttttagcaatcataacaaattcaatcaacaaataatgaatatagatggaaaatatatacataataataagattattaaactcagagagtagacagagaatagagggacataataggaacaagtcatttcattattttagggacaattggtttattgatcggaacgcatgttcacgtcgaaccaaccgaggaaatcatcatcttggtagttatcgttattcaaccaaccgttagactgctgctggaagaagttatccatctgatcagcgactccattgatgggagcaccaatatactggataggtgtagcttgtgcgcttgctggatccaccaagctgggttgctggatttgcatcgagtcactatttatgaacatcggttggttaggcgtagtatctacaggttggtgtccaagcatagcaaacgactggtgctgaagcgcctgtgattggtgagccaataacggctgttgaggtgtagaaacaacattgtcgtactccagtttgattttgactgtagatggaagtataggagcatttgtggttggattgtctacctctggagctggagtctgcagctctcggatagtatccttgatactacctgtggcttctaacatagccaaaggtataccattgatttccaaaggtttgtttccagatgcgtttctagcctggttcatagcttgatcagtaggaaccaaagtagtaatggtagtcccgttgggtgtagtggtggtgatggttttgaagtcgtccttggtgatctggttatagaacggcaaaggtgcgggtcttttactgacagaagtagatgtagtggagttgggtggaattttcgtgtcttccaaagactctgactttttcgacttgtcaatcatagttcttcttctaccttcgtggacacaccacaccaagtcgtagaacaaggatgcagttaggtgtgatctcatcctgttgataatactaccaccagcttctaaattatcgttcaacaagatgtcagggtaggtatagagaacgatgttcaagttttccaatacctttgctgttctggatatatcgtttttcaagtctttccatgacgacaaagtgtttcttaacaatctgtgtaccgtgactatcagctgcctggagctgtccacatacttgtcaattaagtaacgcgacaagtgcaacttgaaaagaagcaacactgagtacgtcatcgcctgcctgacatatatgggcaattctatcaacagaatattgtccttcaacatttgcgaagacaccgtgacaaccctggtagctgataagtaagctgagctgacgtatttaacctggtcttcgattggcgtgcctggcaaaaaggcaaagcagcagatcatcaacttcacatagagatagtagatttcaattgcagatccatctacaatgttcaatttgaacttcaatctttccaactcacgatccaagatgtttagcgagccagctctgttcagaggctccaataaaccatcgggtcttgttacagaaatacccatgacatttacgagtttacactggaaaattgacaacgaaatcaagcacctaaagtctttgggcaatgtctggtccaccctggcattttctagtaaatagtccgtggtgttgatggaaggaggtaaacctaagaccgaggaccagaactgctcacagaagaaaacggcaatccatgatctggttctccaacgttccgcatcggggccaagacttacttgggttctactaaattcttgaatgaactcaccacctctgtgtaaacctaactgaagcgataaatttttagcaagaccaataaaacgatacgagcagtcatccaacaccttttcgttgggcaagggccagatggagaggatgatgagagcctgaatcacatgggtcgatctgggtgttctgatccagcaggtttcaatagccaactgcttgatcaacgaagctaacgacatgtacaacgttggatcaggttccgagagagatgcagttagtattactgtccagaaaaggagttgcgatttatggtacaattctgtcgccgatcgagaggtgataatgggcaagaaaggaagatgctttgtcatgaagatatggtgcaagtcgttcgccttgtctagaggaagatgtacttctccaagtatgaactctgagacatattgcacttcttctctattcaaatgttgagagttaggcgtgttgtttgtagacggcgaagtatcggagccttcctgaattacatgggcgagttggttagggttggtgctgctatttacagagtcattgaggtggcccgatggtaacgatatagagttcggggaggattggtaagttccagcaggatagagctgcggcgactggaagtttacaggcgagtttgtagaatgggttgactgtgccctaggtgtatacagctgctgctgctgctgttgttgctgctgttgcaagatgttatgttgatttagtgcctgggtcaaaagcgattcattctttgtgaggatttcgatcttggcccggagttcgtctacatcgcttttgagcgattggatctgggatcctttcttgggtctgaactgagggtcgatttcgcacttaagacccattctttcacagcgttgacatggattggggtagttttccagagcattacatttgatcttgtgctggcgacagaaggtgcacgaagtcacaggtctgtggccggtttgcttcgacttttccagactatcgtcttccgccatgctgatagaaacaggagcaggggctataggaactatggctggaactgagctcatgttcgagctgatgttggtaggaagagatcttcgcttcttagagtctgctagtcctgaggccacagaccgtctttttccagaaagtggagttgcggagccagacaattttggcgagggcgtctgctggggatgcagtggcgacggcttgggcaagatggacttgatcttggacttctccatgttgtaacagtgtggaagtggagtcttgcaagcgaaaagcgtgaaaggtttgtactagaaaataatttgtacttcgaaaatgtctgaaaaacgggctcgataaagtctgtaaaacgagcttgagttggatcgaaagtgatgcaaaagaaagatcagaccaacggatggaagacccgacgacttcaagtgtttcactctgttccgaggagacgcacacggttcgattgtctcgcttgcgtgtcgatgctgtcttgttcaaacagactttctagagatcacgagctggagccgacttcggatacgatccagttcagtatgggctgacaaagcaagatgagattgcgatatggagcacacacaaatcggtgggaataaggtagcgatgttctgccgcaaaaaagcactgctcttacaaattcgtcagctgggaattctggtgtttcgtctggaaaacgaacgttaaaaaccatttgtgtgtacgtagtgagtcaatgtataggaaaagtttttggggaggatggtcgtgcgtgactcagagatgaaaaagataaaaattttcgcggagccaagcggggcggaaagcgccgcaccgtgtgcatgtgcaggtaggctgtcgaagagatgaaaaatgtgcttggagatgagtttaccaaaaacctataacgaatgtatatggttacatatggatatctatggctagacagatgccattgagattcatacatgtatatagatataaataatctaacgagaatttttcgtgtataaatagtgaatctgcagcttatgaatgccttacacaaactgtacagaacacaatacataccagcatgtagtattaataagaaatcctaagcgggcattgatcgtttagataaaatccaggttatatgccttgccgaattccaagaagacagtccatgacatttccatgacagttgtagtacataaacataaatggtactatcttacgaagtcgcttttataattttatttccatggaatatacatataatgtataaattacttaaacctagattaattcattttcaatgctacagttaatctggtgactatccatataattcatatatttatggcacagattagaccgtggtggtgcaccatttaaacagtctgaatcgactatttaatagtagtactacaacacgttcgacatatagacaatatgtttaagcagtactagttcatttgcaatactacttcatcgaatagatactattgaattctttcgtcttcttctttcagcaccttgctatggtgactgactcacgtcttccggatatttcctactggttgtcgtcatcggttcgagggtcgcctataccgtcctcgtagatagcaaagacacactcgctttcaggcaaacaaggactatcgtagatcttgcagattctggtttcggctctaccctttttgaacatcaaccgggtggtagaactgtgagctatgatgttacctccgatgggtttcttagggtcggggttatacatggaagccataccatctacttgagctacgacttggttggtgatcaatactgctatgccgaattcatcagccaaccgctgcaatgttctcatgaactgtgctacatggccctgtctagcactcaactcaccacggcccgaatagtcggtacggtagagcgacattatagagtctacgataagcaatgaaaaacgggattctgccatcatctgtgctgcaagcttcaaaagttgcagctggtgctcggcgttgtaagctcgggcatacgctacgttatccaaacagtcgtcagcattcaagccgtatctctcagctatggacaccaaccgattcggtctgaacgttccctcagtatcgatatacaaacatttgccttcgccgcctcccatatctatgggcaactgacaagtcacagccaacgtgtgacaaagctgcgactttccggttctgaactcaccgaacacctcggtgattgatccagtctctacacccccacccaagagcgtgtccaactgttttgatccagttgttaagcaaatcaattcggctcttctggaatggaactcagaagcagtggtaaatcccatgggcaccaatttggcagcctcggtcgagatcttgtcagccttagcctcactgatacccttgacggatatgagaattcttttgggcgtatatgcgatgctttcgatggtatggtacccttctgccttaagcttattgatgtctccagacgtaataccattgccttctaactgctcaatgagcaaaggtccgccgagctcctcgtcctcgtctggctgctggtgctgattctgactttcgtacgcgtgttccacttctgccagtgccatttttgcggtctacaaatgtgatggatcacgtatagtagaaagaaaatgacataaacagacgcgaatgttgatatttacattatttgataaagaagacgcgtgtgcaggtccaagagtgaaaaatgagaaatactgactaatgatctggaaatctaccagctggagacctctggacgacatcggctaacgagaaacgacatctagccaaatgagaacgacatgtcaaatttggcatgttggatagcatataggaccgtatatggaatgtgagatctgtgagatctatgagatctaccggagatattacgcacgagatggcatattaaaggtgggactttagatctacaataaactctaatgtatgtaatatagctacaactcctatctctcttcttcacaagtagagacaagaaggatattcgtctcgcgggaaatagccgaagcaattgactatactaccgcaacagaaagcctgaacgagccctatgcacagcgaagccgaggggacttttggtgcgattactcgacttcgaggctgggatcttcaacttcaaaaattagtttgacgacttcgggatgacgtgatcgtcttcaagggcggatcagtttgcaactgtcgctctatttttccaagactaaatttgcaatatagttgaatgaacaagcttggatgactttcctggccagtaatgcttctctgctttacataccaacataccaacaagctgaacataccttaaggattatttcttccttgaggaggttcagtttgcaaccgtgtcattcttattttgtatgagaggaggacgaataatatagtacaattaataatatagtataatttttattatcggatgaccgaatgtgcacgactcgacgacttccattcactctggaaattcaatttactaagctgctgaaaacacgaaacctacggaatatatattctttgctggaaacagtagtggtactccggctttcgttggaccctgtttccatttctgataaaatagccacataaggtggagagatgcatgtgcatattgtagcgccatcttgctggaattaggaggaggtttggcacattgtggggttgccaacagctgctggcgacatctggtgatgttgacggattaactaccatttcggtggacatccccaagatcgaagacaacttgaccgaaaccatatcttcggataatgtttagactaaataattaaagttaattagcagcagcacaaatacgagatcgaaaggaatattctgattcagtaaaatatttttgtggatttacgaatgcattcttcaaagtgtggagactgcaagatgctaggggtgagcgcagagaagggatgagactctgctcatccgataaagctaacaaaggacgggaattagggggctatctttcacattcccagagaagctcccctcactgtcaatgctgtcaccagttgaagcaccttgcattggggtgcgtgacatgctaacaaagaagaaggcagattgcgattgttagttggccaaataaggcaaatgtcgtgattctttccacatgggcgacaacaatagataagccaatcttgaaatctcaaacgggagtctcctatcggggatctgtttggctagcggctggtttccatgcaacgaagtgagccagtcgcgaaatcttgaaaactgtgcagcacgtttcgacgagatagatttggatttgtggagctccggaaatgtgcaagatcagatgtgcgatgcgaaatgctcaaagagtaggatgtcatcttttggaaagtcgacatagcgaccaagattcgctgctgatcctgacatcctctctatcggattgtttcccatcaggacaattgctccagacgaccaacagggagatttgagagtgagacaatcgaagggatcaaaaagaatggctgcaacacgcgcagggggatgcagacagacaccaatgtgcaacagagagaaaataatggcatcgcaacagacaaaagctggctgcacagctgcatggtcgaacaaactgctgggaccgaagaacagacaaaaaaagtggcatggagatagacaatggtagcagagtatacatcagcgtagaccaacatatgatcgagatgacagaagctgtagcagatgctcggggccagccaccagatggataccctgaaactgaagcctcttgttacatgactctattggcgttgcccgatttgtctgcccaaacaggaaataccccgttctaaagaagtgttcggttgcacagacaatcatgcagcacgttcccaaaacggcagggtcgtcaacagacactttggcatgtcgtggctgcggcgaaaacataaacaccagatgtgaaattgttccgtttgggaaaatatttgtggtctacatacaggccacagcctggcagtaataaacaaccaaccagtttcagaaaacaatctctggccatacctggtaagctttggtcagggtattgtttgtatatataaaacagaagcttttttctggcggggcagaaacagctgcgagaatcctgactacttttgtttgctctgtgtctttctttccgtcactgctatacataaccgtgactgaagtctgtcgtcaaggttttgtcagaaaagtctttgaaagttttgaaagaagtcttttgactagaattaaacagtgatacatttcgcaccacggtatcatcatcaacactccacaagaaccgcaggcaacataagctgaaccacaaacgagttgaaacatccttaatcatcgttaatacctctacagtcatatcgtcgtctgatacattaacgttttcatctttttatttgatactcgtcaaagaaactttttgttagattcttcattccattactattcatcaaagattaataacttcattcaatatctcagacgtctacaccttctagtaacatcagaatcttcatatcatacactatctaaattatctattctagaagatacaattcatttctatcattcctaatcctccattcatatcacatacataatgacagcattcgtagcatctactgccgggccaatcccgcctgttagtcacactgctgttggctcagaaatgtccaccacagttgcttctactcctcgtagtgcttccaatatcaatcccaacgtcgttaaacgtgttcacagagaagtcagattcggcaattacatcctcggctcgacactcggagaaggagagttcggaaaagtcaagcttggctggagaaaagacggaaaacatcccagtcaagtggctataaaactcatcaagagggcttcaattcagaaggattccgattcagaagtgaaaatccatcgcgaaatcaactccctcaagctactcaaccatcctaacatcgtcaacttagtagaagtgatgaaaagtggtaaatacatcggaatcgtcttggaatacgcctccggaggagagctctttgactacattttgcatcacaagtatctcaaagaaaacgtagccaaaaagctttttgcccagctcgtaagcggtgtagactacatgcattcaaaaggtcttatccatcgtgacttaaagttggaaaacttgcttttggacaagcacaagaacgtcataattaccgactttggtttcgtcaattcctacaataaggataagaacgacctcatgaaaacaagctgtggctctccttgttatgccgctccagaattggtgttgacacaatcaccttacgaaggcaggaaagtcgacatttggtctttaggtgtaattctctatgccatgttatctggctacttgccgtttgatgatgatccagaaaatgaagatggttcagacatcgtcagattgtaccgttacatctgtaaaacacctttgactttccccgaatacgtatctccattggccagagatttgttgcggaaaattattgtgccagaccccaagaagagaatcaacatcaacgatatcagaaaccacacctggttgagtccatatgctaacttgttgtccatcagacagccggaatgggacaggatccacaaggaaaaggatatgtctgctgctgtgactgctgctactgcttctgcttcatcttcaaattctcaaaagagattctcgatgataaacgaaagaacaaacagctcagctctcatgattgcttcttcgagttcaggctcttcgcatggaagatcgtactcatcaactagcatcagtcagttgtactcttctccatcaatttcgtcctcgttggctaatgctgtagctttacctaagctcaacaccaacatgaccgctatgaacaccgcggagttgtcaacctcaacaaggtcaagtccttctcctacaaagtcgtctcgtggccacacaaagtctgcatctatctccaacacgtacccaacagccagtaatgctctcaaggctgtcgtaaacgataacaactctagaacttctgtttcttctgtagactcacttatccagccaatcttcaatccaaaccccccaccaacgacttctaagggcaactaccatattttccccaaccccgctgtttccagatctacgacttacaccggtacggcaatctctacgatcatcgaaagtcccaccaaaacagcccaagaaggcgaacatactattggattattacccacaactccagttgcacctttgtcagcttctacagcatcttctagagactctaacagattgcctcatacccacaagaagccaagacctacctcttatcacccatcttctatgacatccactttgatttcaggcaacaactcgggctcttctgtgctttttgattacatgaagatgccttcacctatcaatgtcccaatgccccaattcttatccacctccccaaccaagtcttctcccatctctgtgacatctagtgaagtagcgagctcttgtagtagccctgttggcaggtctcccagaactggaagtaactccagaagaaactccgttgtcactcatgtacacgttaatggcgtgttgagcaacgagaacacatctaatgttaacaacggttcaccagatgcagccaacaagagaaactctgtattgagctacttggaagataagattgatacattggagttgaaggaactgttcaatactagccagttggagaaacagaaagaatctcacgaaactacaataactccacaaataaatcaactgccaacatttgatacccagctctcaccttccgtgaatgacgtacctgtttcacaagaggctgtccaagaagttgcaccagcttcaaaatcgaaagaatcacttcctgaaaatgcatctgatgtcgagatgatcctggaaaagatgaagaaatctgaaggaactgtgcaaatggtccaagagaagtcgcaagaaactgtagactcgattatttcacctgctgcgattgcaagacgagaatcagcaagagaaacttccagacacgaacacagaaatagttccgaagttagactgaacaagagagattctatttccagggatcaccgtgaagctaacaaggagaataaagaacaaaagaaacgtaacagattcagcattctttctttctacagtacctataactcttcatcttccaacttgtcttcaatgcattctaataccaataacaatctgaagacaggtcacaagaaggtattggagccatcgacagaagcaaacatttccagtcagaatcattcgaaggatcaaaaaagaatcaactccagctcttcttctcaatccaagagatcttccatttccacgtctacagctacttcttccgccaatgccaaagaagctagtgctgcaagaaaggtcatggatttcttcaaaagaagaagtgtgagaattggttaagtagagaggaaacagaagagagtgagtattggttagacttatagtgtgtgaggataaagaaaagtaatgattttgtttataagagatggggcttccttatgattctttattacgttggatttgcttgttttttgacttcgattgtgcgatttgcttcaacgatctttcaaaatggtgtatggcaaatcgaatcatgttccgcgatttgttttatctatgttaatattaattttgcaacttcttttttattgttgtttggctcttacggtattggcggtttttcagtgcaattgctacttaatatgttacttccatgtcatctaaaacttgtttattatagctaatattactattcatatagaatgtgatgaactttttaatgcctttagaaccttctatgtatctcaaattgaagataaactggggaagcgatggcctgcatacgaccacccagctttttggctgaaaaatctgatatcattatgactaatttcttgttcaaatctacaaattctagcattatacttgagcaatgaatgagtcgccagatccaggcgatcctgggccaccgctagtgagtgagatactgaattcagaagaagaagtttgtgtagaccctctggttgatgttctagaactggcttcagatggctccgatgagagagctcgtcctcaagaagaccagaaagagattgacagagaaaacaacgaaagattgaaagaagaagtactgaatgaagtgagccaaagcgataccgaagatattgatgaatacgaacaaaccaaagaagaagaatttcaagatgaagaacttgatgaagaacttgaagaatatgaagaactttctgaagatgaagagtacaatgatgaaacacttgcttccactattatccgagaaatccaagatggtacttatatctgtttggtttgtactggggagatcgatcagcactctcaagtatggtcttgtgacgaatgctacagagtgtatgaccttgattgtatcaaggactgggcacttcgtggttcgtcaactgacaagactagtaagcaatggagatgtccagcttgtaatgttgctattaagaatatcccctctcgctttacctgttggtgtggaagggttgtgaatccacatgctaaccctttgtctccgttcagctgtggcaactcctgtaacagtcaatatgaaaattgtgtccattcttgtagttccatttgtcatcctggtgcccatccgatttgtggtgcaatgggacccttaatgaaatgtcaatgtgggaaagaagccaaacaagtgccttgcttaatcactccatacgaaactggctggaactgcagtaatccctgtgaaattgtaatttgcgatttgaagcacaaatgtaaacgtggatgccattctggtttctgtggagtttgtgaagagagcgtatctctcaaatgttactgtggaaaggaagacttgcaattgagctgccacgaaaaacaacttgaagaatgccacgactcggaaggtaattcatggattggtggaggacgttgcaccaagaagacgcgggtgtactacaactgtaacaaccattatcgggacttagagtgtcagcctcttccacagcaagtcgagatctgcagacttgatccctcgcaagtcgatacctgctactgtggaaagacgcatgtagaggcaaaaggtagaacgaactgtactgatccaattccgcaatgtgattcacgctgtgataaggtgttaccttgcggctgtcattgtctaatgaaatgccatcctggtccatgcgaatgcttttctaagaaggacatcaagtgtgcctgtggccatgagacgttttctgtaatgtgtagattcattcaggagggttaccaacccaagtgtaaacataagtgctctgttcttttgaattgcagaaagcattatcaccgtgagcagtgttgtcagtatgaacaggtagctcttaaacgagaacgagacaagaagaaggcaatcagaaataataccagatcgaattttaacgacgagataatgacgatggaagctatacatatatgtatgaagacatgtaatagattgaaatcttgcggccaacattactgtgaagcattgtgccatcctgggccatgtggagtttgctacgaatccaccaacgaagacttggtgtgcaattgtggaaaaactgttcttccagcaccagttcgttgtggaagcaaacttgtttgccatgagcagtgtgttaggcccaaagcttgtggtcatcgtccagaacctcatgagtgtcatgaggatgctgtagcctgtcctaagtgtactgctttagttgctaaagaatgtaattgtggattgaaggcagatattcctggtattctctgctcgcaagaaaatgtatcttgtggctccatttgcactgttgctatgctgtgtggacatccttgtctcagatcctgttcttctcgttgtaccaaagataacattcataacagttcatccctctgcatggctctctgcaagaaggtcagaaagaattgtccgcacttgtgtaaaatgaaatgccatgccaataaagtcggcaaaagcgctaattgtgatattaccagatgcacagagttggtccaagtgacatgtgaatgcggtcgtgtcaagaagaaagtgccttgtggaagtactgtagaaaattcttctctcattggaagtactcttgaatgcgacgaagaatgtatcaaatctaagagagacaccgagttgcgttctgcattcatggtaggtgatgccaatgataccttgaaagatgagattccttattcagagctggtaatgtctaccttccaggctcaaactacttggtgttcacgtattgagaatgtcatgagaacctttgttgaagattactatgtccaactcgatcaagaggtcaagtcacccaagagaactttccatttcccacccatgacttcccctcaacgtacgtttgtacacgagttggctgaagcgtacaaactctatagtgaatcgcaagacaaggaccccaaacggtccgtgttcattgtcattactcggatgtcgaaattgccagaaatgacagtagccaaagctatagctcataaagatagtttaattcaagaggctaacaaggtgaatgaattgaaacaacaggatatcgaaaaggcagcgttcaacgccttgatcatccaagacgtctttttcggcatagtgaaggacgacttggagaacgagttgaacaagtatctcgaaaagttttccaataaggaaccgaaatttcagtggctcaaggagtctactttcatcttttactttaatacaaccttcgagaaagtgacgccagaagacgaaaacgagttgtatttgttgctgaagacgttgcggaaggtgcttcgtgagaagtcattggcctttgactgtaagttgtgctctatagacgaaagtgctacctacgttctcaagattgataacgtcgccagtaccccaacgagagaatcgacccctcagcctgtcaagagtatgaactcgtttgacttgcttgcagaagagaatacccaaatagaagtctagactctatgcattaatgattgttattatgatatatattatacatacaataaacgagggaactcgtcaaaagtgttcgaaagtgtagtgatattttgggtgacttaagagtccacttcttctgatttttcagcttctacggattcttgtgtttcaccagcttcatctttttcttcaaccttcctgtggcttctctttctgcgtgttggtttcttttctgtagtatcttccttagtttctgtcttcttcttctttatactcaatgggttaggacccttgggtccctttctcttctttggagctggctgttgaacagcttccttcagttccacttctgattccttcggcacaataccagtatactttgcatcattcaaaccagccgtgagcttctttctttcaaaggcttcactgtacttggaagtagcttcagaaatcggctccatgaccatcacggctctgttcatgaaaatcaacggcacaccaggcactttgcgcaacttaactctcaattcataattttgagctgccaccacatatctgtgcttattaacaccttcaatattcacaatagactggacacataagctgggatctatagcttctctgtggttacatctacgtctctcaaactgcttggcaatatcaatggcactctgatttttgctgtcgtaaagtgcttgcatacaacactgagttatcattggcttggtctcgccttgaattgttctgttcaaccctttcacaatgtcataggatgccttctcacagttaagaaccaattcgctatctactatggtctggaaaggttctctgaacttgaacgtatggagatatacgttcatctgacgcttgtacgacttggccctcttctgtctcattgtgtatcagtgaatattgaagtctttccaaaagaatatcgaaccagttgcaaactaagcaatttacagagatgagcaaatcggtatactgaaaatttcagatcctgcataaagcacacatataccgattatttattcttgaaatctaaacactaaatccatatacaatttcttcaatgccgtatcatatcgctcttgtgggtctagttgtgtatttcatgtgagttttattctatctattgtattttatatgatctttgttgaagtgtttttcgtttgttcaacgtcttgcttggccgaagcatcatccatcatcaatacaagggccgttcttcatatgtagtttctctatggatatacgaaacaaactccttagatgtctatttatcacttctgtcgtgattaatttctttttacattgttttttgtccccttcacgactattggaatcattcccccagtaggaatagtgaatttacgatggccaatgactgtgatgaaacctcttatggttccagcgtgtgacgttatggaaataatgctgtcttcgtcctcgtcgaaaatcttctgaagaactccgtctacacggagaaactgttggtgaagctgttctctaactgtagaatacttttgagccaacaaatcatcttcagtaaaaccttcttcaaaatcaagatcagtatatttagactcaagagcagacttcgtagttctttcatgacagagatgcactccgatggtttctcgtacattttctattacaatgggtctcggtatttcgatatctctccacgtatggaataaagtatcaatggacctcagtaagggagacacatagaacttagtgggaagtggagcaccattttcaagctggctcttccacaattctccattttcctttgcctgagaaatgcccaaatctgttaatttcgcgtctggaccccattcgatctcgccatcggttcccacaaatctccatctactaaaccaatctgccttagggtatttatgtgaagcgatgttgtgccaaccttggccgtgtcttgccaagaatagcattttgtacttcgtattcggtacagaagtcgaattgagcagttcaagtctatctatgagttcttcccacggcttggtggttccaaagccttgggtagcatagttaaacttcatatcatctgtattgtctgatgtctgcatgaaaaaaccttgaacaggctcaaaatcccacgaaaacgtagagtcactttccgaactttctgaagtactagcacaattcaacacgtcagccttggcccttatctcggcaattcgtttatagtaaagctcatcctgatccaaatcctcatgggcatctacgtggtctcgctcgttgggtactagcaacgacattattgtaaatgtaataccgatgctttttggaaaataggaaagtgacagtcttcgagatacctcgagaacatcttcttgaatgctagctgtctgaacattggttccagaaaaggtgcaaaatgagtcaggacagcctattcaccgacatacgtgccgaaatattcacgtgatgaatcatgtgactgaataaattttcgtaagagcttttttagatacgccatccgcctgcatacgctgcatagaaaatcatgcactcaataaagatagaacttgcacccaattttggccgtagtttgtggaggaaggagacatcatggaacactaaaacaaaaaccgaacgacgaagcagaaggtcgaaagagcaggatgacacagggaaccatacggatactttgggaaaatcaattttcctttctcttttgtgaccacaattgctcccagcaaaatagccaccaaatctgtcttttgtctgatatgctgcactaacatcgacccaccgcagacacaacagacacaaagacacaaactggcagacaatcagatagcatttgcggaagatagaaccatacacggcaactacattatgttcttgaatgcaagaatcttgtcattttaagcttcatagacaagcaatcgcaagcgagaatccggaattacatttccaccgggcaactactcactggtaattgttgtgttggatccactttggaggggctgctttggatgagatggaacaccctgcatatgagtctatcgtcgcattagtgaaatactatcacgtgaatgataacttgcaggtttggcacgaccgtttgcaggttggatgtgtttttaatctcgactaagaaaagatgctggtttttcaattgagttaacatttttgcatttctttctttattcacgacaacttgcatttttgctgcaacagaaacacagggaccactccagaagcagcaacaaatcatgtcggaggaaccaaccggcgttgcgcccgaatcggctccgaaaaaaaggcttcttgaagacgccgacaccgatactaagtctacgtctaacacttccgtttctggcactgttgaaaatctgacagacataaattttcatccagacaccaattcaacagaagcttcaaaagggaatccggaccagataccagtgtcgaatggcgatgaccataagagaataaagcttgagcccaaagttggaaacgagtcttctgttactcttgcggagcaaaatgagcctctagttgaaaataatgtggaaacatacattgaacaattagataaggaaaagtcggcaacggatcaagatgaaccagcaaacaagatagccacattcgagccagcaaagcaggcagtagaacaagcaaaacctcagagtcaagaagataagcaagtaagtgcaaatgatgaagatggaagagataaagaacatagaaaggacaaagaagaactgaaagaaaacgaggaaataactatagaaacccaaggaataccagaaattgctaagcctgctgttgaagtaaaaatcgagaaaggcgtgaaagacggaaatgtaaaatctgaaacgaaacttctttcggagtctacagctgatgataaaatcaagcaagaggagccaccaaaagataagaatgctcacaaagtggttggtattactggagaaaaacttgcggttgcttccaacggtgttggtgttaaacaaagcacgcctcagattgtagtagtcccacccaccaaacctcagttgttctatagtccgttgaagactggattggtgtatgacgtgagaatgagataccatgcaaaaattttcacttcttactttgagtacattgacccacatcccgaagacccgcgtcgtatctaccgaatctacaagaagcttgcagaggctggccttatagtagatagctcgctatcaggtgtcgaggatataggtcctcttatggtgaaaatccccatcagggaagccaccgctgaggaaatcttggaagtccattctgaaagtcatctcaaattcatccagtcgacagagactatgtctagagagcgtttattagaggagaccgaaaagggtgactctatttatgtgaataacgattcgtacttctcagctaaactctcatgtggaggaaccattgaggcttgtaaggcagttattgaaggcagagtgaaaaactcgttggctattgtgagacctccgggccatcatgctgaaccagaaactccaggtgggttctgtcttttcagcaatgttgctgttgcagccaagaacatcctcaaggcataccctgagtctgtacgcaagatcgttattgttgattgggacatccaccacggaaatggaacacaaaagtctttctatgacgatcctagagttctctacatttccttacatagatatgagaatggtagattctaccccggtaccaagtacggaggagcagatcaggtaggagaaaaggatggggaagggtataatctcaatattccgtggagaaacccaggaatgcacgacggagactatatatatgcattcaaccgggtagttcttcctgttattcttgaatttgaccctgatctcattatcgtaagttctggattcgacgctgctgacggcgatatcattggtggatgtcatgtgacacctgctggatatggctacatgacccatttgttgaagggcatagctaagggtaagttggcggtgattttagaaggaggctacaatttggactctatcagcaagagtgctctaggtgtagcaaaagttcttgtaggagaacctccagaagccacagtgtctatgcagcctcatttggagactattgaagtaatagatgaagtcgttaaggttcaatcaagatattggaagtctttgaggtacggggttcctacaacttcatttgacgatgtctacgacttgaacggcactggctctaactaccaattgctcaacattggtgagccaataagagccaaccaagtcaatgagttgttcaacaagtactcgtttgtcaacctccccataatttccagtgctactgaaggaggagaaaagaatggcatcttcagcacagacttgccatcgcatttggacgatatcataatagctagtccagatatctatgaaagcacagtagtagttcttacgatccacgatccaccggagatctgggccaacatcaacccaatcaacggaagcattgagggcaattcttctgtaatattggaacatcccttgatgcagataatggagaagatgaagaaggaaacagacaaaagcgattccaaagaaaaaattggctacatagatatcaacgttccgtcataccagttgcccattccctttggaaattcaaagcagacttctacctataatcccacatttttcgcccaggagctcttgctttacatctgggacaactatttggcctacttttcgcagttaaagaagttagtgtttgtcggctttggtgattcgtaccaagctatagtacatctatatggtaaacgaccatctcaggatatcaaagatttagttaagggtacggtagccttcgtgaacaggtcgaacttgaaggctttggtcccagtgatggatgagtcaatggtggactggtactatcagaactctgtgatcttcaccagttgttcgaatccatgttgggttaatctgaacggaactactcgtttaggaaatggttccactgaagcaaacggaggtgacgatagcaacaagagaccaaggagaaaatttggcagagtgttgaaggcatctgtggatggcttgtacgatataatcgccgaaagattcgacgaaggtgttgacttcatcttggattccatcgaagagtactccagcagcgagagcagcaactgagttgcaatatggcgactttgtaattgctctctaatgctggcagcttttagttctccttatgtattatacgaatagatgataaatcattatctattttacagtagtcattatgtattatgcgaatagatgaataattttcataaactatcttacagtacctgttctatggatataacaagagttggataggatataacaatattatagacagaatagaattgagaattaaacgtaactgggaaatcgttttgagaactgcttctcaagatcgtctacgtcgggtaaggagacgtcgctggagttgctacctcgtctttgctttgtctccagcgactttaaatgaaccggcttctttggtttaggcggaggtcccttcttgccggatggtttgtacttcggttgagagaaccgtttcttgtctactactatttggtctctactagacgataagcttaacgggaccttcggaggtcccccaatcttctccttggcataatctggagccgaatggacaagtttgtagttggagtcgcttccattagattttggaatgtctacgtcagaagaagatgtgctgttggcagataacgtggcatttatagcttcaatatcgtcggcagcactggtgtcagtgtatttcccataccctgcagccagtttacgcaccggagccagggatcccttcaacatttgcattctcttctggatagagagctttgggtacggtctttctggaattctcaaatgatcatgttcatcagattttgaagcttcagagctggatttgcggagctttccgccagtcaagatttttttgacactgttacgcttactgggcttttcacccgtatgagctggactctgaacaccattgatactgcctcctgtgctgatttttcttaagtggctaatggccaacttaatactaccaccagtgtcgtttctagcgaagtttttgagcgaatggttcttttcttctttattgcgtaagaagtcgagggtatcattatcacttctagactccaagcttcttcttccactaaccaagttagtgctctggttaccgctcaactggctctggacataattcaccaaagcagatgtcgacttgtttgcatgtttgtacaaatcaacttcgtcattgtatatgttgagattgtgagtcttggtatcagctgatggcccgcgaatatgggtagacttcgaccgaggaatctcagctccagccgagccaagcaacttcgatttatctattgaagcaaacggatcgggagtcttcgttcctgctatcagaagagatgtttgaacctgaacagaaacaggagctttcttcacagaatccacgttttcagcatttaccttatgctttacagctaatggattaaggtctacttcttctgtctttgaagacttacgaatcagttctttcacactgaagggaactacgtcaggggctttggagtctccacgcatgacagcaatttcacccaagagctgtacagcgtttggtcttctacgaggatcaggacggagacagcattttatgacatttttcaatcgtgcggaaaacatcagacctggcagatcacggaaacgcaacgtcgttgagctgttgagaatggcagtctccatatcttccaacgaagaatggctaggcagctcgaacggagtcgtgtagtagcacaacttatacaaaaaacagcccaatgcccagatatccagcttatcatcgatggggaaccccttggataagtctatcatctcaggagctctgtattggggcgtagtgtgttgcataatatcttcacgtaaaaccagtagctccagcgccagtttcggtggagctatataaccgacagcagagccgaaatcgcacaatttataagttccatttccatcaataagcacattctcaatcttaatgtctctatgaatgagtggtggccggaggtggtgacacatggctacgccgatagtaacctgaaacataatatccacaatctcacgctcattaagcttgttcacaagacgagtattcatgaagtcaattaagccattgttctggcaatactccataagtaagaagacctcatactgttggtctgaattagcattaggcgtattagatgtcattctcagggcatgcgagtctatgtagctgacgatgtgtttgttccctcgcaaacgtcgcatagcatctacctcttgtctgagtaaagtcaactgccacttggaaggcactgctacccgtttcaagcaggcgatatccagaccttggaacgctggcagaatgtgacaggtgtagacatgagcaaagcctccagccagaatgtactggatgatctggatctggtgcaggcccaccgtgagcttcgttccaggagcgtacgcgttgggcggaggaacgggcattggcttggaatggttggagaaattgattggaaagaaggggaatagatatgtgaatactgaaaagtcgataagtgtaccttattggtcatgtgtgaacaatcatgtgacacagatggctgcggttagatgtgggatatctccatctacgaaattagctttaatttagaagttcaagtctacgtactcaaaatagcataaaccagtataaaccaacggttgttcttctactcacttcaacaaagctccatccatgtagctgggctattaaatcgtactgaacacttagctctctgtctcagttgggataatattttcccttaattaattatggcatcacgtgcacaatttagtgtcatgcaggaatcaccagacatataaccatctccagatttcaattttccaaataccatgtctccctcttccattattcaatgctctttatatagaaacttcccacatacacaatgcctgacttctttgaactttccaccccgctggatttggacattgtctccgatttcatcttttctccgctggacctgaaccacgcactagtctccacatggtccaatgagatattgctctacgactgctctgccatattggctaatcccgactctccaccacgtacagaggcatcagtgacgtttgcaaccgacgagaccccgttgtgtttatcatacgctggttctaccggtgcctttgtcggtttcctcgatggatccattcgtcccattgactttgagaactcgcaagtagacaatggtgtcaaccttgcggcaccgtccagtgacgacgagataggcaatggaatcaacaactttgccgtgatacctggaaaagaaaagttattagctgcgagttcgttcaatggaaaattgcaagtaatcgatacaaggcaacgtgcgcctatattggtgaaccagctttcacatgacaaccagcggcgtaagatcttcactatggacgccagcgatgtatacttgactttgggattgaatggcaacaatattgagatctatgaccaccggaacttgaagattcctgtagagaaacgagaagtaggactcaaataccagataaaagacctcaagtgttttccaaataacgagggcttcgctctatcgacaattgacggaagagtctctgtagagtatttcgactcttctccgcaagtccaggagacgaagcggttcactttcaagtgccatcgctctcatgataaagtcacgggtgccgatctagtgtatccggtaaattctatagctttcaacaagacatacggtactttgttcacagctggctctgatggatttgtctacttatgggacttggaaaaacgtaagagaatgagagcatatcctcaatttctatctgaagaagatgaacacgagagtatagccagaatcagacttaattataatgacctgcttgtcggtgtagccaccagtgatgataactacaatcgaagaagacgcttatctgagagcaacagtctgcgtcaacctagtaaagtctatgtgaaggtgcttggatctacggagtgtaaacccaagagccagtagtaaccataagatccatgaaccgcaccagagactatttctacgaaccatagtcttaaactgtgaatcaatggcaaacacgattgccaattgcttcaagaactttcaatgtttgaaaatactacgcaaatacgaatatacgaatgcataccataaatgaacaattctacagtaaaaagtaagaagcgttctaatgaacaatattttttctattttcgcaaccattctgccacccaagagccgtttttacaatattatcggagttcgcgaaaagaccccatctcagaatttttcactggctcgaaatggtttccatgtttgggtaatttactcttttcttacacattccatctagaaccccgtctgacatcgacaccttacatgtatctcggtttgttagaaaaagtgagaagctttttcaaaaaaatgcccaaattcgatgaggattcccaaaagttcacaacttggttggaatcgtccggtgtaacgatttctcctaagatcgccatagtagatttgcgagaccaacaccagggaagagcagtagtcgctgttgaagatattgatgctgacgaggtgttgtattctatcccaagaagctcacttataaatgtaactaactgttctttagtggatgaccatccacatctcaaggaaaagttgcaaaagttgggccactgggaaggtttgatcactgtactcctttacgaattgaaagcgaaaaaggaaaacagcaaatggcttccgtacttcaatgtcttgccgattaatgacaaggaaaactaccaattgaaccagttggttcattggtcagacgaagaattgaagagcttggaaccttctctagttcttgaaagagtaggaaaggatgactccttacaaatgttcaataaattgtatcccaggattataattgaagagttgggtttgaacgagttggaaggaattacgacagaagacttgtacaatgtagccagcttaattatgtcgtactccttcgatgttcagcttcctaaagaaaatgtagaggaagaagatgaaagtcaagacgaagagggagatgaagaagaagacttggaagtagatgacgatgacgtacttgaaggaaatgaagacagcgaagagcaggaagaagttgctgaacctgatgacatttacaaagatgacatagaaaacgatggcgcagtcaaatcaatggttccattggcagacacattgaacgcagataccactttacacaatgctagtttgaaccattctgaaggagaccttatcatgaaaagtatcaagcccatcaaaaagggagagcaagtttataacagttacttcgaccaccctaatagtgaaattttgagaagatacggatatgtcgaatcacaaggatctctgcacgattttggtgaagtaccattgtccctaatcaagagctactttgtgaataacactaatttgactggagaattccttgatcaaatcttttctattctcaacgatatctcagagtccatggaggacgtagacgagcaggtagaaattgttttggactcttatgattgttataagagtagagaagtgatcacggagttagtatttatagtccaagtgttatcagtcatatctgaaatcaacaaggaagaacatctcgatacattgaatgacgaagcaagacaaaagcaaatcaaccgtatcttccagaagtgctaccaacttatcgaaggcaagaagctcaccaacaacttcaagtccaactttcaaaagattttgcaaaccagattggaacaataccctgaagttgccgctctaccatatgaagatggagtcgcattcactcgtagaaagatggctgaagttgtgttgaagtctgaataccagtctctaaagaactgttcggatataaccgagaccttccaaaacggaaaaatgggtaaattcggctttatcgatgatggtaagttgattagaaacatcactaagaagaggccagcagaagaaagtaacgtcagcaagaagaaaaagaagaaggtacagtaaatatctaaaatagaaccttttgtatattcccatataattattagataaaaaaagatattaagtagaattgaagtgagccattaataaaatggcacataaataaatgtcatgaagaacttacttcaagctcgtatcagggcttggagaaagcacacttcgagcagaacacataggtgacgatgagctacttccgttactagacgtgttgctgtgactgctagtgttgctttcagtggcttctagtacatggacttcactaagggtcttaattaccaattgtcttggtcttaatacttgaaatcctgactgcttggcctctggggcgttccgcctaaggagcttgttcgtgaaaagttttaccttatcaaagaagctgctcaacttctcatcaccaacctgttgtggctggttatcatcagaacttgaagtttgagtagatccgccccagttaggtctggagtcccacaaagccttcacttcgggatctatggagtcatcaataaagtactttttatagatctgatcaccttcacgaactttgtagtcgtttctttccttccgcaagttggagaactgttgttctttagcaaaggattgtaggtcagtatctgagaaattcggagaatcttcgtaatttgttgataagtcccgatcttcagattcattgatcttgttcaacaatgtcttctccgaaaagtgccttttgagcttaactttttcaggagctatttggctatctttaaaggctgtattagactgaagatcgtttctagctctgtagtaaaatttatcatcatcttcctcatcgtcaacttctagaggcttgacattattagaagaatggttgaatgcgaaatcatagatagtcgaacttagactcttaggttctttggttccaacaagcggaacaccatatgatggacggactgtctttggtgctacgaatgaattatcactggtaatatcaattgtaggaaacaacgacggctttaactgaatatcaaccggatgatattcaaactccatatcaaattcatctttactttcagtgctagccaatttgctattataggaaccttcctttttctcacgatggtgtctaataatggaaatgattgtcttggtgaaactgtagaagagctgaatgagaaaaacaatcgcaacaaccaaatgaatcaatagctggacatatgcaacgtaggtcctactagcttcactcaactgtaatggcctgatgtaaggaatgcagaggatggtgacaaaaactcttgcaagaggcaaaaacgattttgaagacacccaactcaatttcacgaaatacgggcgtattgtgaacaagagtactaagtcaaggaactcgagtatgatcaaacaagctacttggatactaccatgatcctggagtagcccgataaccaacagcttcaacaagacagaccatatatctattatgacataataaaccttattaggatggtagtggttgtagaagaaagaccacaacaaaatggtcttcatcgaagtgtacaatttagaaatctttttgctgcgaactagaccaaactttttgaaggaaatcaagtagttgaacgtaaagtagcccactagtccaacccataatgcgaaaagaatagaaccgattgccaaactgaccagtgcaacagtactccaatcgctggaattaggaatagtagttgtcacatttgtaaaattcaatgacggatctaaaaatgaagtcacattgactccagcaactgtaatgttattagtttgcaatattttgctacgatcagtggggataattagctgatcataagaagaagaattagagaaggagatatttgtcaatgctgtaatgctagggtactgtttgttcttatttctgatgtcaccagcactggtgaacataaatgaagtaaacaccaagaatggaaaaccaaagataatcaaaaaggcatcgagagcttgtcctactatgaagtacaagttcttcttgaatgtgaaattaatctgatcgctatctggtttacggcaattttttttgatgttgaatttctttgcaatgcaagagaataaaattttgagcaccaagaatgattgctgtatggcaatgattattcccacaactattatgagacataagatgaagttcggccaattgttgagaatggatttgtcagatgtgaacaacgtcaaactcttcaaacctccggtgttcatcgtcagatagatgttgtccattcttgtgaccgtttctgggacactacgatgcaatatggagacccctaacaaggcacaccatcttatctggccaatcaagggctggtagaagccaggatattgtagatctagaccaccaataaatagtgcaaactgaagatacataataattccaggcactgtggtatccaactgtttcaacaactcttcattacagatcgtggaagccttgaataagaacggattagacgactcttggtacgatgagtagactacaatgaggatgttcaagatggcagttaccaagaggaacatgagtattcccaagagcaaaactccgcttatactatctggctgtactggagttacgtaaaccttgttgcagccgatgagttgtgagctcaaatcattggaaaccacagaaaatcggactgaatacgagcccaaggtgtggaaatgcagactaatatctgcttcatagtagaaaacgatagagtcgttgacatataatggacattgaactaatgatccggtgctgttcgaaaataaacgttcgatggtctcgttgttagtagtgaagtattccagccacgagtcactgaatttggcatctgtttctggaagagaagtgttgaagaaagtgccatttatagccaacaggggattttcaatatcttctctttttgcgaacacacctcttttagcatttatggtactattgtatttatcagaagctggttggtagggtgctgtttctggggccgggggttgtggaaatctgggactgttcatgaaatcagtagtgtttttgacggccaagacgtcacaaaaccgtttgttttcttttatgaaagtcttgcccataaagtcaacttctatgtggaaggtggtatacctgtttgtggtatagttgacatctgatatcataatgtctgtatctgacatgttggggtagtatttgacctgggagttgatcaagaacttgagttttttgtgtacttcgtctagtgcaacatcgatgataaatggttcgagaaggtatccttttagatcagaagagcacagctgtgactgaacaaatcccgcgtctgtccatcgtagcaacgatagtactatcactagacactgtagtatgaaaaatgaactcatggtatattaatataaaggctgcaacgattaatgacgagctatgatatcaaaaatggatagtaatgaatgaattcgatgagcttgaaggactctttctataatgatgatgttgatattggtaaagatttatgatgtatatctctgttttagatactgtcttaacgagcgcacgaaatgaaagcaaggataagaatgaaaggaatcaatgaaacagcttggttctgtcaaccagatatgccaagtccttctctgtgatttctgtagacaagacctgcttgtcaacgagtgtaatgtgtcaacttgtggattgaggtttgtatgattagactaaggcacgagtgtgcctacaacgactatgaaagctgactgagcaacgacgaccagacgttctggaagagtatcacaggcaaacagagcaggtaaacaaaactaacaaactatcttctacaaaagaacaagacatgctttcagatagtgtgatttagagaaaaggagtctcagaaaaaaaagactgcgtagagaccgagctaagattatggctatacgaggtgggctaggagtgaaacacaaaagatgggtcttatgataaagagatagagtcgaaacgaagaagaaaatagagcagttagatgtcagtgtggaggaataagaaggaaaagtaaaatagagagagtggcatgtctattttgttgttgtagttgagtgtatgggtcacgtgaaaacatcaattcctcttacatactacaactctagtggagctaacaaagttagaaagttgtatactcgtaccttcagtggcattagagttgtgctcgactcagtaactacgatttattattcgtttctggtatgtattactatttctaataattaataatgataggaagctgctcatgagtatatgtacaataatgataatgaaatcgtgaagaaaggtgtttgatgaaggaagccgttagacattggaaagttcagttgaagtcaaagaaatcgttgcaaagttgaaagatgttcgttccaaagctcttaaaattcgcatgggaatcagttcaaacttaacaagatcaagaactctcaaattcttcatatacattcaaaagtttctcaagatgcttttaaaatgttcttaagtattctgttattcaacccctgaactcttgcctagcaaccttcttatttacaggagggtcctctagactttaatggacctggatctcgatcagtttaaggatttaatcgtgaaccttacctctcaattttggatacaatctcgaagcgtggtagttaattgtgcttaaacggtcagattccggtttgtgggtctccatgcaactcttcaagtccttttcaaatacattgcattgtaaagcaccttctccgttggaagcccagcagttcaacaaagaagacatcaacacaaaacactggttagtggctttggatacgatcggctttctgatcttcaaccggggcaaaggcggaaggttcttgggtggaggacccactttcttgtaagccatggtggtgtcttgggagaattggtgaagagaagataatgttagttctagagactggaaatttttcattggttatattgaaccggcgcacgacattaatgagatttagtatggaggttagctatgagacgttaactatggagcattaactagtgcaagattacgagatgaagagtatgaatggtgaaagaaacaaccacttcaattctattggctgttagtgccaaagaaatgaagtatgtgtagagtataaactatgaattctagtatttttttccttttcctaattttagatattagtggagttattgcactttcatttagtgtaagttctgtaagcattctaatcccataaactataccaactacagagtactgaccacggatatctatcatacttataggaataatgcagaacaatacagaccttaaggaaacacaagggaaatataaatacatatactctacaatatttctctcacaataaattaagactaaatacaatctagtatatacccatatatactccgtgttttctatgttgacgtctaatactcaatcaagttgtcaaacttcttccacttcaacatcaatcctcccttcctcaatattgtcttcctgttcttgatctcaacatcaaatctgcgagcactgctattcaaccagtagactctcttgaagcagttggatttgttcaagtaagggttgtagatgacagcgtcatagtctcccttgacgtacaatggtttgaagagcttgagcaacttaaacttgatcacattcccgatattttgaacaatccgtttcatgaacttgttcatgtcccgatcattgtagtacttgatacggaacaaggtgtcgatctggtcttccaagttaatcaagaagatcttgtacaagtggtttctgagtttgttctgttgtctgatcgagtttaagataatggagtagttgggaatcatagagaactccttgagatggtagttaatgataagcaacgaagaagaattgacagagttggtggagtgggtctcacacaacttgaattggttatgtttcaactcctggttgctatacatgagaaaacgcgaattcaatgacgacttcatatgtgattcgatttcgtgctgcaacgtctttttcattaacaacacctcgttctctatcctgattactacatcgttgtgaagatcaagcgaattgtagttgtccacagagtctattagaatggagttcttgggaacctccaattgatggtagatgctgttaagataattgttgatctggtctggtttactcaactcgttgccattaatatttccgctaagctctttgttggctagctggttactctttaaaatcttgcttgggtctacattggtcgagttttcgtccatttcgatgaagtcaagatcccgtttgtggattggaatcttggtccggtacatttgcaaatcttccacaaactcctggggatagcaccggtccactaagcggtgtttgccatttctcaatggtaagccagagatgctgcggtcaaaaccgacaacattgtatggcaagttgaacaaattctcgttgtagagatatgctccaggagcaagcgacaaattgtcgatttcttttctacgcaagagcttgaacttcttcgatattccgttgaactgctggatgagtactgtgataggatcgtcgtatttacgcaagtatctcttgaagtatttgaactgcacagttttatcgccatcgagtttgcccaacttatcgtaaatagactctattttgcgcaactcttctgggttgaacaagtcgagctcgtcgggaagattgcggatgatttcctttcggttgaggcaatgctgcgagttgaacgaaaagagctgtctgccctggtcgagattctgttggatgcgaagatcgtcaacagtcatgtgagagatggtgtcgtaaaggtcattgagcttgttgaggttttcctgctgttccgaggcgtagtaaggaggaagtatgtcgtctttggacgaatggactggaggtatgagtggttctgatggagtagcagttacttgtgaagccacagtagatgaagatgaagaaggcgaagatgctgttgttgacgttgtggttgttgatgatgttgcattctgctgtgttgctacagaattctgtgctgttgtagttgctgaagcagaagctgttgaagttggaattggatcctccgagctcggctctcggtccgtttcctccgacttgatgttacccttttgaagcgaaagccccaaattcttgaggagctgtttggacttctcgtccttgcaaagctgtcttgtatttgaaaaggctcgtacttgagtcgaagcactgtggcacatagatagggagttctgggctcggctaaggcctagtctgggaacaaacttgattgccatagtaggattagctattggggtcaaccaacgtacagatcgtacagatagtggaaagtatgaaagaatgagaacagtgtaattagtgtatagactgctgagggtgagttatgggtttgtcttgtagctgagatggtatatggtgcaatagttatctatgaatcaggtgcttggctatctggatttaagaaaaagagtggagaacaaactcgcacagaaagtgcaccgcttcagtaaattgtgcaatccttttctttttgccggggtaaatctgcgcacggatgcgtacgcgggggtatgattaatagcgcggtttaccacaaaacttgtggtccagcttctcagtccaaggagaacatcagctcgaatctattggtggtgacaaaattagcagattggtagaagatatttctatatagagacatatactgaagcacttattgaactcaatttacacaaaatagtattgatacgagaaaaactacaaggaacgtaacgagaaagtatatgactacgcaagagataacccaattttggattgcatgtatttcgcaattatagtggagattgtgctttttcagtggatctgatgctccccatagttctggttcgataattcttaagtgctggcagacatgaatgccattttagtcgcctactgagcctttctagcattgcgttatagttgaaacccggtacagcccagacttcatgttgcagatagccgtttattgcacgttaattacattacttctttcactccttgtaatctcctacccagccatgcttatcaggcaacttcgtctatacagtgctttcgtgccttatctggacactcacacgtgactctgcctagacgaatgttcataatctcctccggactcctcgagacttggggcgatcttcgaactatagtttgattttcaaaaatactgtcatgcacagccttctgtgaaaaagtatcagatcaccaccagatcaaatccagcatagacttgtatactgtgacattttacaagttttgtaaaagttttgtaaaagttttgtagttggtttcgtaaatacttgtatccatcggcatttgtagagctactttgcctttgcgtatccaacatttgtagcattcttctccataccctcggcggactgtagaaacactcgtcagttcatggcacatacttttttgtaaccgcctcttcgccagttcctgtgtcatatttgaaacatcattattaaacactttcctgtgacttttattgccggatcacctctcagcaatttttcacagtgttcgcatctcatcagatcacatcaatttacctttagttcgcctttaacgtcgcctactgccacaacgagactaattctagccagctccacgcgtgatgcggcctccatttacaatttgattcacgctatgtccactttagtctaggtggctccgagaattgactgttgagctcatctcagatagactcaaggctcaagctcacagattgagacacgccgatgaaatttcgcctcctgaaaaaccgttccttgcagatgcgcgattgcaaaatatttttctcccgaggcaactccataatcaatccagatctgaaaaagtcaatggcatatacgaactcgatgtggaccgtggcgaggtgatacaactacattctaaattattatccattgtgttattgaacgccgtaaatctataaattgtaaagtaacctattttgagagaagtgaaaaaccaataaatcagaacccagtgtatgtgtaaaaacgagtgtaaagcgaatgtagtaggtggccgttgtagaagtcttaatagttgtatgcgtagttcatctgttgttgaccgtggctattgttcaatttcttcaagaacttgttcaactcgtgttcttccttcaatgccgtcatctcaattatgggatcgacgtcgtcagaaacagaaccacgaggagaaactctcttgttaggtgtagtacagctgtacatggaacccgagtccaataaagaagctgtagaattgaccgaagaaatagaagacgtggaatcttgtctgtagtgagccttgggatgcaagtttgtagattgaaatgaagaaaccgaagtagaagacgatctgctggagatactgtctcttggtgatcttgccatagtgataggagacaacaaagaagagttgccggtcactggagagattgaagaagctctcgaggaagaaggggaagaagcggtagaggcggatgagtccacagacaagtactgctgttgattttgctgttgcttctcttcggcttccttcctttgcttgctcaagtactttctcatcttggcagacttgatcaagtcgtacttgatgttttccaagaagctgctagtggcctggatcatctcggagttggtgattttcatgtcccagttcaacaagaaaagcaattgtctttccatgagattgatgtccttggcggtgaataaaccatcagtgtacttggcccagtgaacgttctttggagacgagtcgttgtggaacttggaagacaagatcaagcagctgagaagaattctgtgtctggtgcaaggcaaaccttgtgcatttttgggcaacttggacttgagacggttcaagtacacaagcgtagccatcaaggttccagtgtagacattggtgtatctgaccaatctggtcaagaaagtcatcaatgaaggtaaaggcttctcagtgttagcatcgacgtaggtagtcttggtgtccttgcatggaatcacctgtaaggtagaaaccacgatcttgtggaccatgtcctgtgagattggcgtgttgaggaagatgttcaatgccttcaagtcaatagtggaaaccattttggaatatatgtgaatagtgtctagatgtagtaggaggtatcaaccaaatgtatgaggtgaacctagtgaaagaatgtcactgcaatgataaggtaatgatagaatgagatggtgatctgggtaaaaagtagattgaggcgatactgaaaacatgggtgaatcctgccatatatatatatttcttcacctaaagtgatgcctattacaggaggcctgattgtactagaacaactatgaaaccaaacaaaccaaaaaaaaaaatccacttgcatcaccatgctggtattgaaatattttccaggtacatgctctactcctttggggataattagatacgcgatttgcatcaaatcgcaaagtgagaacgtatcatagccaaaaaatatttgccagtgatgaaaagtcgaaaaaataatgttagaccagaccgtgtctctcatcccttcggcttgacaacgccatactccagtttaacagcacaagcctctataaacacgcgagaaacagtttatttactgtagtgcaggaaggctctccttcgcaggactagacgcagctaaaacaaggtcgagcgtgtttctgggaagtgtacagtatgtttgacgatttggcgtctgggccttgtttcacttctgtcacactgtggaacaaggctagaaaagctccacacagcgtttcagtattgcaacgacggagcagtgcaccacaggcaatgttctattaataagttatcgattgtggtttgactttgttgccactttgttgccactttgttgcaaccttgttgctatttgcgattggctccttctgcttcgaagcgcttattccttcagcggctagcaaaatttttttcgaggctggcgcatacttattttgcaacaatattcaattgtctctagagcaattgtaatagccgcctgaatactgattgcagttcatgagccagtctccttcttgcaattgtttcaagcactgctttgattgttgaaattgtttcgagcattcgacaatacaaacttcccttacaccctgaaacagggttccatctctattgtgagctctgaacccctgggacataaactgtcgtggttgcattgacaaactacatccttttttcctaaaagaattcttccactacattggaatcattgttggaacacatagacttgccatggtatacctaggcgagtctgtatagcattttacatggtcagccgatttctcatgtgaaaccggaccgtctatgctacgatgtgcaaggctctgcaagttgacgttttgaaacaacggtttcactacgaaccctgaaattctaacttccaggcctactatgcaacggtgttcaacatcatggacaaggtggaaatgaacagtgaggcaaggttggaatattgcagacatttgcggcccagcacacgagcttcgaatgtccaaaattcgtgtatcgactgttacgtaccactgctatttaccccattccgacaaatgccagtaacacactgcaattctccttaaaaataaagtcaatgtcaacatgacacaggtgttccagcatcgaaatatcccgatatggactccaaagatgttaatcccttcgtcgctaatatattcataaaagcgcgtaattggcgtgtacattaattaagtgagcattaattaattcgttaacgacgataaacctccacaatttatccctttgcggtagtcaagctgcaactgcaacatttcaatctggtgcctggcttgcgtatctgttttcttggagtatttaatgactgtcggaattgggcctttaattgcgtggacggttgcctcgtatccccacctagacgatgtgctcacaatgtagtgttggagaacgtaaagccaatgaatgtagaaccgttcaacctattgctctgaaatttgatcctgttggcttggattacaatcaagtcgcggtcaatcagaaattgtgtgcttgtaatgtgttacgtagtttgcttggggctcataatataaaatatactctttctgctagtgaacctaagccagccaacccttgcaagattcaagttgaacgcgcgaatcgtgcctggcgaagactcatgtccacgttgaagaagtacttctccttgcaaaggcagttctctcagttcatgggatactttagaatgataattgtaatccgtgacttccgctcaatagagtaaaatttacactgtatcctctaatatcagagtgctctacagagtaaaacacacgagagattctttaagtggttctacgtcattcattatataaagttactacaccaaaaagtgttctataggaattatcagaaatttgggtatactgggtctgtcatgcgtatgagtactcagactggtgcacagcgttttgtcgtcacttaaaacctggtatggaacacttttcagtaactattaatttacttagaaaactctcattcaaggccgtaatgtcagacagagaggattacaaatctatcgactagtgcacatcacggcaaaacgttaccacaccttgaagaagagtttcctactaggtagagctataatctcaaaaatggaaatagtctataatgagaagaggaagttatttcttaaaagttgaagaggaaatgcgagccttatatagcagtcaacgaaaatttttctcaattctgcaaggcagttacccggccatgtcacatttttggaaccctctcacaagctatggatgcaaaatctgagacacactgcttgttagaacaaaataaagaggatacttctacttttgttggcctctcaaggaagaacatccttttctaattacatagatacagtaatatacagatattgatactcttcttaatcttatgtctatggtacttatttctaccaactttcatctacttcgtcacggaaaccaagtaactggtcaataggtaaattgttgaaaatatcgatggagtaaaaatctgccgttgtcaactcctcttcagcagcagcgttagatggctgccctcctgaatttgtgttcaaactctctggactcaagggattcatcaaaggagtcggaatagacaagttcataggggtataaccagtagaaccgccttcagcagggttaggatcaacaacactggctttctgtccaggtaacttgaagggcccatcgtcctgcgcagagcttccagaaacaacgttgaggccaaagttgaacaaccctgctgatcccgtagccttgccagtgctattgttgttggtattggtattgctgttggagttgttattgttttcgttcttgatggaagccatttggtaccacaatttatcgatttcaacattttcaataaattggaaatcatccatatctgcactgcctatggaatcaactgatgatggaacatttatgactccagccatatgggctgcatttggttctgaaccattagtaccatcaaaagcagcttgtggggtagaagaaacactgacacgagagttggctccatcaagaactggagcttcaatatcttcattgttgatatcgtcaaacaattcacttgctgcatggaagatcttagtcttgccgaacttcttcaatgtgacttcacaaatttctgtcaattcattgagctgatcattgctcaagtctaagaagattatctgctcatcatcctggcaatacttgtagaattcttcaccaataatcatcttcaacaagaaagtatgtgccttggtaacacgccaggcatagtagtaacgctgactcaatctggacatcgcagctatacagaacttgataatcttctccaaaattttagaaagcttacataatttggcaaatttcaacttgtagccaaagttgtctctcaaatttaagccatgatttgcattgtgcttcatacgataaatggtcgaatttagtctcaccaaaatcgcaaagttcatctgcgtagtcttgtgaatcatactctcaatggtggggttcaagatcaagtctgccgtttcaccaaagttgatatagttgttcgtgatcaaagggaagaaagaaggaacaaactcaccacacgttgtcgcaaatatctttttgacatagaagtaggcaaagtcggtcttcttcttactttcgtaataaaggtacatgtggaaatatatggtgagtaaaaagcctttcatgttgatatagttcttacacttcattgtcttgaggaaagggtaaacgtaattgtcctgttggaatggcaccaagaagtatcgcaatgttccataatgatcatttaaatgatgttcaaagtcacccatcaagtttgacaattgtgaaaccttcaccttcttcctgatatccaagcagatatcaagaatagctgtcaacctatagtagtacttttcaaaataggcaaatgtactgatgacatgctgttccatagacacatctgaaatattttcgttaccctttttatagtatggtaacttggtatcgtagtatttctctctgatagtcaaggggttgccgtattggtaagcctggatcaaatcgttgataatcaaaaagaaccaaatctttctaccaagattgttaaccttctcgtcattacagatatctggaaaggtatccggttctctgttgatacccatggaataagccatttgtactaacattccattaaatatctgtgagtctccaccgtcggctccatcaccatcttcaggagaaaacatatgatacaacctcatgaaataggcacattgcaagataaccaaactggatttacgcaacaattcgaattggtcaagacacaactgggctacgtctatgacatctatattgattggattagacaatagatacttcatctcaatagcaggtggggctggatcgttagaattcaagttattttggtttacagctcttctgttggagaaaagagacaaataggagattctgaggatgatcaacaatattccaatctgagccaagtctaatctcttctcgatcttcaagtctcccaagcgactatcagagtaagcttctggaccaaggattctagccatctccaacttgaaatagttctcatctatgaatggcatgtaaggatagacactcttgaagaacttgttgatcaacttccagatcactttttgtttgggtaagatcattttaattttctcaatcaactctaactctctgccaatctgtccctcatacatagttagaccaagcgctatacccagtttgttcatttgggttttttggtgagcctttggattatgtaattcaacctttgagtatcctccagagtggatcttctccttcaggttaccactggtgtcactcgccttagccacatttccgtacaatctcaagtcattgaaaccatccctgtctatagccttttctcggaagatcttttcttggtcgtcggcacctttgggagaatcggcaggagctgaagtctgctctggttccttttcgggtaatagtcccaattccggagctggtgcggttcttgccaatctctgaatggcaagatgtctttcatgctttttagacatcatgaatttccagagagacaaaagaccaggatcctttttcattatcgaaagccaagcaaatggaccgtaattcattcgtctggaggcgtctcggatatgaataggtgtatagccttcgtataaattgatcaagtcgtcatcagcagaaaagggatttatcccaatgaacgtagggtttttgtctggattatacttgaagtcctcaaactttaaaacgtatctgttgacatattgaggtcttccggtatagtctacatctggacggtctgcattatgagtccactgaagaggtggaagctgaattggaagattcccatttccaccggtaggtctagaaccagataagtacgaatatggtatagcattggccgatgaattagaagaagccgaagaaagtgagccttctggagaagttctgttatggacattaccgtttgctgtagatagagatggctgagatgagaatgagtttgttgaagtatgaacacttcgtgaattgtgactatgatccacaagattgtgattatgttgattgtgattatgttgcgatgactgtggcttgagcgaggcctcgatttccttgattttgtttttgagcgtttccaactcagattgcacagccggagctgccagagagggatcttggtggctagctgtacctcgtgaagaatggtttccggagtgattcgaagggccaggtggcggcacgtggaaagaggtttgaacacctccatttgcctgtggcggtttggtagaagctgctggtggatggaaacgttgcacagaaaaagacggcaagttcgagctgtgagaatgagatgacgtatgcggactattgctgctaccgttgacgtggaaagcagaaaggctatgtgattgaggggattttcgtgagttttgattggaggtggccgccatggcggcattaccggttatggccaccggctccagccatatagggtccgagtattcacagagattggctacattgtaccgcacacaagaagaacaaggtctaccacgatcacacttgactttcctctttttgcagtaattgcagctgagcgacaaccggtttcgtttgcgggcctgggcgtcgtctaccatgttggctatgttcagtagaagtcaatagttttcaaatagtgaataaattgaaaaattgtatggttcgaaaaaagagtctaaatataaatgcgacctgatagcaactggtcaagcaatattaataagctccagtaggcagaaatagtgagcagtgaaaattgaacagtttgcgactcgtgatccacaataacaataacggttattgagtgtagactgccggatcagtgaaatgtgcaatgtctggtgagttcgatatgcaaaatgggtaattgaatttggaaattggactagtgaaaattgaaatttccaaaattttgtgtgattgaactttgaatacgtgattgtagaattgtatccttacttcaaaatggccagcaaagatatagcaaggttggtttgttatatatgtagattatacgctttatgagaagagattagtaacgacgcttcagagaccagccgcggcaaattatcaatagaagagtcacaatagggagaactctcggtaaccgtttttttcgcaaacagactggacttctgcagctctcctttttatattgctgcaactatttggttgccttggcttcgatattggaccccggtctatctccactgtactacaggctagaccccgattccatggtttacggtactttttgcggacatttatctacgagcgattctgattacttgaccaataaatgaacatgaaattaccatcgccgggattgcgtctgttttgggaaattccaagtgataaaatgttcggcgcacaatttgattgcaaaaatacctgaaaatgctctgaaaatactcttccatcttgaggccaaatgaccaaaaagaaatatgtaatcatctcgatccgagatcggaaggatatcatttgtgcggctaactcgctaaccacgtcaggatagtaggatcatacagaaccaactagtgtaaaatgtatgtccagtgtagtatctccagtaaatctctcgaattggaaggctgggaaacacagccaatttgtttttatcaactacccacataaccagaaactgggtatctattgttacagtttttattgtcattatatagtacatactaaatctagacatcaaaatggtccaagtctccatacatttcgaacaacttcaagaggtcttccgtactaatgtgcccgttgctgaaatagccaaactctggtgtcagatgtgaaaaagaactaaggtctcctggcgactgctgcaaattggaactaatcgccagcgcattactagacattgccgaccttggtattgagggtgatgctcccattgcaaacactctacctgacccggcattaatgggattagatatcctagaattgttggccaaaaacttggaagggtcaaacgagatgggcacatccacattatttagtggtgctggatacttgaaatgctccttggaaggattagtaggtggacgggtagaggttttctttttcagttgttcttctttagcacctctgaattcttgacacaatttacacaaataagtcaactcaccattggtaaaaaattcaagcatattggtaccttcgtggaaaaactttggattgtacatcgtggcttcgaagaaagccattgggttatccatacattgcttcaaaacaaaatacgtcatcacatacaacttgtatgaattaatgtaattcttactcaactttctgaagtttccaacgaaaaattcggcttctatcaacaccatcatgaataatgtgtccaaaatttctaatcttggctggagagttggatcagatgcaaccttcttggtaagatcgattttgtgatgcaacaatctaacaaagaatgatgtcaagaaagcatgcgtctttatgatacatctttcgttgttggaggttaaaacgtaatcatagttcttgccgaacaattcgacagaattgtccaagacataagacatgatgtaaaccaactggacgacactctttatatagatcttaaaaagctctatgccagcattcattgatggtgtttgcgattcattgtattcgttttcataatggatggcaatcatgtaatacatgcacgaaagatctgtccttaactgaataaacaaacagtatttgatgactttcatgtaactttcctggtgtgcgagggaattgatatcatgactggtaccattcagtggcacagcagccggcttgcaaatgcaatccttgaagaaatccttgccaaagaaactgaagaaaatcttttccaagttgtttgtttccatcaaaatgtcaataacttttggtttatcttgaatgttgttcatctttttaataatgtttctatagccctcaacaatcgtatgtagcttgttgatagtatcgttcttggttccggttgaatcttcactatacagaggcaacttgacgtcaaaaacgtctgttgaagctaccttcaacggcgtactcgagtgaattgctgatgtaacatcggaagtaattaaataattccaaagagacctccagattctaattaatggctctcttttactaattaaatcctgagagccgtagcatgttggatcccggttgagtccgatagaaaatgcatgggttattgcaactcccaacaaaatgttagagtcagttccaccaataccgtgacaatcgtctggagacattttacggaagaaataaagaagagtcaaactttgaacttttctgaaagtagatttagtacagataaggtcgtctgccaaacataggtccacaacattgagataagatgctgtgctgatacgcctcatatcacggaccataccctgttcctctttggtgtacagattgtttactggatcattgtgaatcaaggacatgtaccccaagcgtaaaacaagtaggaaaatacccaacaccgttaagtcgtggtcagattcaatgatgacttggtcgtaaaacccgtggttgaaagaagggtactgttgcaataatgttgtgatatccatcattaaagaattctcgtcaataatgggagcaaatggatggacgtacttaaaaaaccgacaaaagagcatgaacatattcaacttgctggggaaaacacctatgatggctttttctaccaattcatagtactcctttctatttttcttacccgaataaagcgattttaatccaggcaaaatgttcggaatggcatgaggatttgtcttacgcttgtgcgttttcttttctggttcttttttgatagctggatcagttgtcttaatttcagtgcgtgattcaagttcggattcctcttccttgtcagttgtgctgttctgttctactacatctattctagtagttatcaagccgtcgtcctcgaggatgttgtcatggtctacatccacatcttttttgctatcacattcagacatatatgaaccgggagattcatgaatggaatctgaagccaaagatgattcaattcgcagtttcttggcaccaggcgaagtgttctcttctgttccattattgctgattaagcttccagtttcagggatactagaagtagcacttcctggagctgatctctttttcgttttaggtgcttcaagcttcatgaacttgcccatttcaccagacttgaagagtaagatggcgtagttccgcatgatcttgatgaaaggatcactcttggttaaaccaatgtaggacaacactccttggtattgccaaagaggcccttcaagattaagtgcgtaacttgcattggaaaaaaccttcatggtgtcgtcaggattaacctgtagagacgagttgggtcccaagggaatcgaaacgagtctattattagaaaaagatgatggcaattttccaggagtcagtggggggttggctgagctcatagaaatattgctttctgttggagaataagcaaatgcagaaaccgaattggcactagaaacagttgctggaacagcagagatgttgtaggcattcttactagtattggcgtctgggctaatagcaccaacagcagctgcagggttgtcgttattggagttcttgctggtgttatcaatactgtctttgtgagagacgctgttattattgttcatggtggagctggtggagcccttggcattgatagagctcatcgtattgttcatggctagaacaccagaactcatgccatcagctccgatattagaagcagccacatgagctatgggggcgttactattagcagcattactgttcgccaaatcagcatttggaggacctatattcgcattggtgatattaggcaagttttcactgtctggtgttatgctattattggcattattgtcaggtagtggcggaattccaggacgtacctgagttggcgacgctacatatggaggaacaggaatctgtcgaggttgacgatattcgtagttactagtgcctccattcgcagtgttcacattggcatgaacgtcactattcgcactgttggagtcctgctcctggccctgaaatccaggatacgctggattcgaaagggggatgggcaactgtttgaggttaacgtttccctgatagccctggtagtctaccacttggttagcttgaaggtggggaagctgctgtgattggatagactgctggggtatgggctgcgacggagcaggttgctgtgctgtaatatgctgtggttgaatatgctgttgtggaataggttgttgtggattatgggggtgttggtggagttggtccatctggttttggtggagcggtggttgaagttgaggttgcactcctggctggaaatgtggaggaggggggaagaattgtgggggaggatgttggagatgttgaggtgggcctgggggctgttctggtagatggtgtacatggctgtttagcagcccgctgtcgtctacgttgtctttatccagctcgtagtagcagaggtgggctatggatttttttttgcatgttccgcagacgggtctgactcggtcacatttggacttccgtttgcgacagatggagcacgaagctgggattctatgtcgtttgcggtagcccaacgatgaagaagagcccggcgacgacgtggtggtagacttgtttgtcatattctgtagtggtcaccctggaaaaagaagaggcaaatagaaataatcttttgtagatgtggatttaaagatgaagaaaaaacctccaacggaagaatgtatctgctgtataacgtaaaccaaaccctttgtcctgcaagaaaaaggagctagtcctgcggacgggaaactcctagaatctatgctcaatttctggcgaaggtttttctgcctggggcaaaaaatacttcagagtgcttaaatcctgcaagtggggacgagccggcttaatggatggtgtgttggtctcctggtttgaccactgaggaggggagcgcgggtactataggggctgaaaggggctagcgacaactcttcggtttgcaaataaaggccaaaatgtgctgttcgcaatcttagaatgctcctgttctgtgcttcctggcgcgaggcaggctttctgtatcttgaaacttttcaaatgtgtctaaaactgggaatgtgtccaagagcagctttttcttccgttcttagatgcaattcttcgctgcgttagccagttgatattgaagacgtagagactataggagagccagattttcaattctattttcttaaaattataatattaaataattttattttgatttatttttgatttctgtatctggacgcgggtgactgcttcactgatagaccgaggtgcccccgtctgctatgtattggctattggctcgaatgtcttcggaatagttgcgctagttccggatctgttgtccactattgctagggatttatggttctggtgtgtgctccttgatttctctctatgaccgttaaattctgttgagctcgcaaagtataactggattcaattataatgctgaggcgttctcacttcgatgttcttggaagacaatttagcggcggaactgacccaatctagcgactctggttctattcgaactctatcgtaaaatgaattatattttccaccaagaaccctgagtagaacaaaaaatattaaaaatgccgaaatgtctctatatatcaatttatcaacctgttcgatagcaactcgatccggattttgctggtctataaataaatagtgtttaccagcgccgtggaaatggtagtatcactttcacctatacttctactttgtatgatcccgatgctacagtgccgatattaggtccatacttttgcacacttagttttttttttttgaatcatacagggctaccctgttatctacgtaaatgcaccatacataaactatattatctgtaggtgcatgctgctcaagtggacgtctcattcctaatccaccataaccttcctaaatagtaccatagattgtacgagtaagttgtctttttcacatgattttcaatcgacatgcattcaggttgcgcaatctatacgctccaggataaatgaagttgatttgtgtttagccggaatcttgggcatcttgtgaggtggttcatggcattgattattcaccaattcggaagaatccaggtaggaaactcatcgtttaaggttaataataatggactcggtccggtatggcagtagtagtgtcatttgattttttgaccttggtgaaactacctctcgtacagcattactggactgaaaaatgtatgggtttgcctgatcccttaaaattactacactgtattttttgattgctatgcatacagagcttcactctgacttaagccaagatttgaccggatttctggattaggttccatggatttgttgacaacattgagctgtcttttccaatgccgatcttgacagtagtaatacgaatggattctaaattaaattctgtagggactacagcttgcagtggacccccaattttggtcgacgaaggagaaacagtagcctgaagaccacaacaacctgactgtactattccttttgcatttgttgttggagaaacgtcagctcctcattaacccctaattaaatttcaggcgttggtttgcgcccgcttctcgttagtactaccctcaactgctggtagcttagcggaaagctgtagatggaatcttactgcttatcaaccagcactactctaaacatattttagtgctggttgtgtattgtagggcgtatttcggacgtttctagctggtagtccgcatgactattttcttacaagcagcgatatagtaataggctacggttcagcatcgcatatagattgaaattgcccatgtcctctaacgcagctgtctccgaatggagcctttgtgtgcaccactgattcaaacatgcatacggttggcccagcacacatgcaccgtgtagttgccgaaggaataattttcttcggtaagacgagggaacatcttttgccccatggcagcggtgttgaacagagcctctgcgtccggctagaatagggctgatgccatcacaaatttgccctgtcggcaattttgcaactaggctcgtattctgtgcagataggaaataaactttgctagcatgcaacaataccgaagttaaaaatgcactctaaatgccattgttcggctacatcactcgcaaatcatagcggtacaaggatgagcatacgcattgtaaaacctagtttagaataaagcttagggagaacagcgccctgattcattgtgatctgtaaccggatatgtccaagctgctctaagcggctgaaccagagcaactgcaacgatgccccggggctatgaaagtatatctccatttaagccatgaggaaacttgatagtggacttggctctagttggtaactatgccactagcacatttttattgtgctgcagggcaggtgttcgtggggactgcggcaaagaaagttggccggagaacaatacctccctcctgattataataaactgcggtcaacaagaaattcatctccacggatacaatgctcaatgaaatttccaacagtggccggctgtgtaagtagtagcgaacaaggagtttggttcctggaagtgaaattattcaattgttctgtaatgtatggaattcctgggcctgcgaagatgatacgattctcacgccgtgcccattcttggaaagacgttcctgcttagctgtatatgttccaatgttgttgacggtccttacaatagagagagccggtgtcgagaaatgaaaaaacgatgtgacattcgggcagtatacgaagtggctgcgacagagtgaaatttacataaaaaattaccacgaatatttttcagaacagaacgacaacacctctgactgaatagcacaacttgtgggtggtatccgctaacgaattgtctacgaccttccgagcttcgagactgcaaccataaattggaagaaatgtgtcttgtgtctactgctgatgtaagcacgcgacaacttgtctttacgtgtcgcactctgcattctacgcgttgtttatgaaatctgaaatattctggaaattgctttaacccatgtagttctacaagttaactaaagagatcttgaggtcatgaaatgagtgtctcggacatagaaactgagcggacccgttattatgacgcctacgacgctgacgacgcggagttggatggttttatcgtttccgacgaagaaaacgacaatctcgaaaatgagaatcgcaatgaaagagatccagattcacggaaccaagacgatgtagacgaatacggccagccccaaatagacaggatacgaaccatgacagaagcattggctccaaatgaatctcaggccctgaaagtgttgagagctcatatttccgttttggtgtctgctttgggtggtccagatcacacttccaatatctccccacctccatataaactcggccacgatgctttggcatgtttgaaagatatcaaaagatggattaaatccgtagacgacagacaggacagttatcaggtagctttggcatgtgccgaatcaggattggtaattaacgacttgattgtaattctctgtcaatgggattcaaagaataagaaaaaagaagatttcagaaacaaacgaactatggaaaaaattatgttggcatgtttggaattgctcgttttattgacttggtctgtggagttgcgcccggagctgtcagacaagcagaagttgctctattacgatgtgaagaaagcacagatcaaatacaagagagctattttaacctacaacaagggccagactctcaaggcagtaattcgcttggttcttcccataatttcaaaggaaagagttgaccgtgaaccaaaagacaatgctatcatgagattagttcttttcttcttcagaaacattttgtacgtagagccccccagtcccagtatttccaaaaagtcatccaagacaattgttgttaccgataatatgcctgaaggggtctcatacgatgacatttcgttgtccgccacaatttctgcattcagcaagaacagagtattgatgctctttctcactctatccagtggaataggtgtagatttcgatagtcggtttctcggccctactcttttggaatgtatccatttgttagtcagaggtgtcgatccaaatgatatcttgaaactaaagcaaatgcgcattccaacagagatcaacgaccccggcaactcctcactgccattccacaatgtaccaccagcttcatctacaacaggcttgcaattgcaagatcttctagcaaaagaatccaagatcaaaaatagtcaaacgcagagtatgtccacaagacatggccgcttcggatcgttgctttccatcagaggtgatcattcaatgtctttcgtagtttctggacaagaagcattgatcaatgctggacagacaatgcaaaaacttgatcgttctaagaaatggaagaatcgttcatatttcaaatacgattcggacgagtacacaaagtcatcgaacactacctatatgaactatgggggcctcgtcatccttcatgagtttatcgaactgttcttagctggcggttgctttaacattttaatagaaaaattatcgtctgttttctccagttcagactccattcttgaaaaagaatacgaaactgctacatttttcttgacgattgcatggttcttccagtataagcgagaaaagaccgttctttactcttctgggacaactaacttgcaaccaataggtgaagaagatgacaggaacgattttggctctgttggtgcagctctcagtcaagtgaattttatcttgcttgtaaagtactgtgttgattctttcagtatttcccctaagcgatggagttcacttcatgtagtgttgatctgtttgaaagaacttttggagatttctaatacgctctttactagatcttcgagttcggcaggggacgaggagcagaacgagttggatcgagagttggcagagggaattataagtcacttactcgtaacacaggatttcctttctattctttatcatttacctcagactgcttctaggcattctcctgagtacctaaaggtttgtatttctgtggttcacatcttgctcaagacattaaagaattttgccgaagaggatgttaagttatttatacaaacaactagaaggaactcgaagaaaaaagcaaataaagaatcaaatgatcaatccgacgctgttgagcaagtagatgaatcggatactgaagataaacgtactcatgcccgagtcaccagagaaagaaaaatcaactacgagcgcacagaggttaaattcttccaccaagacactgtttcaacctacattgagtatttatcgcgatacgaagatcttacccactatgaaatcaagaaatgtcttacttatttccaccgattatttgtggtaagaaaggatttcaatggattgtacagactagatttcatgcaagtgctacacaagcttcgggattacttaccatctcaaagcaatattcgagggcaggtagatgaattcatatactatttcatgaagaaattcaaggctagcatcgagagattccccaaccctattgaaattttgtttccaagatttgaagatgcagaatctaaaacttatttggcaacaggagaactatacattcaaacagaaagagaaattagaagtgctaatgtcaaaagatttgaacctggcaaaccattggagtttgttagacattttgaggacaacgaaaagtacaagattttggtaagtgccctatatgaacaaggacttctgaatatgttggtttgtctagtggaagacttgcaacgtattcatggaattaagcaattggatgaggatgttgatgaagtgctccaacttaaagaagacttcaggcaatatgttcttacgaattctcatttgcggttgttgttgagaactgttggtttaattcctggttattccttgagtcaggaatgtcaagttccgagtaagttgacaagttcagatattgacagtgcaataacgttgataaagaaatggatgggcttacaacctgctaccttcgaggatggcaaagacccatcgtatttcttgagaagcacaggggacacagttgatagaccaattgattacctggacagcgaagacgatattgcattcgagatcacaccaaaagatagaccaaacgagagccactatgatatgcttactgaattggatgaattggaacgtgctatcagtggagctgaaaatcgtgagaaaggtaaagctagaaaaagaggaaataagtccagctccactatcaagaaaaagctgttgcaatcacgtagtcgtcgtcctccaaggtttaatgtggattccgatgatgaaagtgaattgagaaaagaagtgaagtcttcagaattcgttcatgattctgacgacgaatcggacgatgaagctttctttgaaagagaggagcgtttgaggcaaatgttgaattcatctggtggtatcgttaatgcacagcagttgagtgaattcaagaaggtatgggctagtttagagtctacaggtggaattgctacagctagtcaagttgttcgtgcagttgaatctgtagctaacatttcagatggtgttgatactcatagtcaccaagacgacagtcaacttggacgtactggacttacagttactcagccagaatctcaaatttcagaatctcaaccttctgattccgagaacgaagactctagtgaagaagtatctgaggtccaaatccgaaagagattaagaattgaagatgatgaaaatgacagtgacaataatgtgtctgagaattacgtcagtgctgaagagggagaagaagcgacaccaaccgttaaacgtaagaagaggctagttattagtgatgatgaagatgagtaaactgtctacatgaatatatagatgtattctgataaatgcagctattctttttccgtatgtctctaaatatgtaagttaatcttctacacaatgaccaccttcagtgtctttaagactggtacgaatgctcatgaatgacgaaataaacataacagcaaagccaaagagaacacaggagatgctgggtaatgccttccatatgataaagtctctcttgtctttttttcctgcgttcttgtagtcgatttgatcccatgaaagcttgaagtagcacaatggagggatgatgtatgccatcaatgatgccgaagttgcacctatcaactctaatataataccgagattacaggtgaataatgaaacagacatagaagaaaacacgagcacggtggttataacaaaatgctgtttggagctcaactcaagatgggctgtgcttccattctgagcgtcggaactgtttgctaggacaatgtcttttaggacatctctgacgacaaaaatctctaacggaaaggtagtcaacatattcaatccaaagcaaaacctggctacgttaatccagttatcgttgctcttgaagttgttcaagatgtttccctttgtggcatcaccaaagttcaacaaaccgctgattcccataaccaaacaacagaccatagaaacaccacatgagatgtgggtcaatttggcaaatttggagagggtagcattcttcattgattggtagatgagaatggtgttatggtggcagaccaatgcgaaagaaataactgaaataccttggaaaatgttaaagttaactgtccattccaaggctgtcaaatcagatctcaacgaaggatccacaaatggccctctggctacagtgagaactacgatgatcaacatccctactaatgcaaagcctgaagcctttgccaatttagagatgtctctattaagcgacaagggatatgaaatgcaagtggtgaacaatacaatgattgaattacgcttgaacaaccatccaaaaacggagtcagaactagtgaccgatttggggatgaatgccttcaatacatgaggtatggtatcaccgatgattacacagaaagccatacaacctccatacgcaaaggaactaatagcaaacaaaagtaagatcttgccgtaagttccatagcaatagtttacggtgtcttggtacgatctagtctgcgacaagtgggagttgatgacaatcaatcggagagtccagtcaatgacaaaagtcaaaccaatcattaccaagattccgccaacaagtccagcgtttctgaaagcaaatggctggccaatgatcccagctcccaaaatggaattggccatgttcatgaaagccattctcatactggacctaccattttccacactttctgttgttccattcccaccaacttctacttcgtaatcgagtgagttgactgactctaggtcgaattgatccgttggacgtaaatgcgaattggaatttctgtggaaatcggtttcttcgaaatcagaatctgcatgaaaaggctggatattatctgaatcatcatcgtccaaaggctgtagattgtgattctcggcaaaatgggcctgcggtatcagcgtatatgcttggttgtttagcttcggtttgtcggacatggctgtatatgtgaacacatgtggagatcaattaaggtgaaaatcaagaataattcacgatctgaaatatttcaacagtctgataactgtacataagtacattcgtaaataatgcgaggaaagtgtgaaaacacaatgacgtagttgacgcgactacactcccaatctacaacacagttatagaaaacatagaagtagtaaaaaggagtaagaatcaaaagtatgcctatctcaaatttcgaagtccttgaacataaaactagaatccttcttccttcttcatgaaaattaacttttggaaatctacaagaaaaagaatttcagagtgcgaattgcaaagcgaaaacctacaattcattttgataaaagatccagttctttcttttctacccaccatgtatgattttgaatagggtttagctagtgcagtagatatacaattggttgtgtattcatgatgcttcgaccccagggccaagatctaagctcgcagtcttccacaactattctctgtggaatatgccatcagaacacatctaattatgcatgcccacaatgtaagatattatactgttccatggtgtgtttcaagtcgccagagcatgaaagctgctccaaacagttcctcaagaaaaacgtagaaagctcggaaacagaaacggcttcccagaagaaaatgctagagatattagataaatacactatggaagacgatcaacaagacgattatgtagaaaaggagcctaaaagacaatggaaatacgtgcctccagaaagcactgctaagcagatagaagaattgaaaacgaaatttggcttctctggtctgaagaagaatacctttgaacatgagccatcgaatgatctggacagcgacaaaaccgaccatgaacttacagcacaagaagaaagggagttggaagaacttgtcaatggggctacggaggagcaacttttgcaaattctttctccagaacagctaagacaatttcaagatttaattgaaaacggctactacgaggacgcagatagtgatgacgactacgaatagaacaatattgatttactttactgcccttggcttaacctttaacgactaataatccacatgacagtttagttatttacaaataatgcaatgaagtaaattccagaatttttgaaagctagtatagaataatcaactgacgcatgagatttacattttatatctattattcgcaaccttttgttaaaataagcaattaagatttctcagaacgaaaaattttaagatttggcaatttttatcccttgctgatggttatacaggttatatatatatatatggatttcccagcaattatattaaatctccagaaggtagcatttgcagccgttccttggaagagacaagctttgttccgttcaaaaaccggttccgttcacgtgactagtataagacagaaggatttccgattaaagaagagtcaatacacaaattatatgttggaaacagtcgaacttaacagatagttacacgcgcctttggtttattcatgttttggtgttgaatatgaaacattgagcaatactctgttttaaataggtggagtcactttctatccaaggaaaagacgatcctgcataatttccatcataagatgcccatctacaaaagtttgaatgcaacttcagattcgtacttttgccagtattcgtactttttttcagttccacaaaatggcatttgacaaaccaggaagaggaggcaaaagcttcagaggaaagagcagaagctcttacgtggatatgcgtgagacaaaatctagggatatcaagaaagcattaactcatagagccagattgagaaagagttacttcaaattgttagaaaaggaaggaatgagcactccaagagatgaaatagataacactagcatttaccaattagagagtggcgaagacgaagcagatcaaatacaagaaagaagagaaagaaaacctttgccaaaacaggaaaaggtgaaacctatgaactttgctgaaagggccaagatagccaagcagagaaaggaagaaaacagaaaggcaaagttggaagatgtaagagaaagacgccaaaccatagaaagaaagaatagagagagggaaaagagaaaagaaagaatatcccagaccaccaagactggacaaccacgtatgggtcctagaatcaataatttattggacaaaatcaagaaggatatgtgagaatttctaaaatcatctactttcgacacatctcagcattttcatttcacaccgcattgttttgtattattaggatagttgaccaatatatatatttacaagactatcgtcgtattggcattacaaggagagtctccttctagcgttgcgtagcatgacgataaagtcataaaggaacaattggctagttcttttgtggtaggaccaccagttggtcaagtaatgaacaaatttttttaccgaatacgatttgtactccttggctattttctcgttttcttcgtcgtaaactacacgagcgcagtaatttgccaaaatcaaaaaggttctctcaggtcccaaggggttgttcaaattctcatccaagctccttgttaagtcatttgtcttgagaatcaacaacaccattctcggcatagaacttaagatatccatcaagtcttcaagaacaccttccaggtagttcaactcgttttggatgatcctaatttcttcttcggatctcagtttcttgatgtcgttcaatgcattttctggagctcttccggtgatggcagagacaaagattctgaacttttgatcgccttgtattccagcaaacttctcagcgtactctctcattttgggcacatcactatcaagaacagccaaccagaagtgagagtaatcacgtttcatctgaaccggtatatctctgtacaaaccatggtcatataagatgatttcaaagttatggccgttcttgtattccgagttttctagagctctaatagccaagttacctccatgaggatcacagtgtaatcctacgcctggcgtgaagatcatgtcgttgaatatgtgtgacaaacacgacgaaacatcggcggcagaaatgttgtgttctcgtaaataatcgaggttgtctaatctggcacctcctacatattccataatcaatattctttgctgagcttcgacaatcttaggaactttcaaagcagtctctctcttgaggtccttgaagtaagcagccgtcttttgagcattttctgcttcttttgtaaagtccaattcgataaagatagagctctgcatttcttcaccaagccaggtgagggggtattctgggaaaaacttgtacatcaactcaaacacggtcttcgtcaagaaaacatcaagaggaacaaattcttgcaaggaagggtgctggatcttgacagccactttttcgcccgactctctgagcgttgctatatggacttgtgccaaagaggctacaccgaccggttctggatcaaactctgaaaacatatcattcactgaggtacccaaatcgttgacaaacattttctcgatctcctccatggacgaacgaggacactgatcttgtaagggtatcattgtatctgtccattctctaggcaataaataggtaagggcagtgatatgctgacccaacttgatgtagatacctccattcgtctctaaggctctcaaggtgatatcagctgctcgcttgtgggtcttctttaacgccttggagcgctcttcacgggactcgtagtccttcccaagcgtttgtaagtacatgttgaaacacctgaagacagcaactgtcaccaccgtgaccctttctgccgtaagaaccacgtgacggacattgtcgttagtgtagtataatgccgagcctcctaagccaagtgctacacctactgtgaacatccttttgaaagatctaggcttggggccagatctggcaaaggttgagaaacgtcttgtgagagatgacgagatacggggactcatccctcggaaaccgactgccatcggtccgacactgtgacgggtcacagcacaagctgtgcctatacgtgtcgtcaaaaccatctttttgcgtaactgtagaagaaaaacatgatgtggaaagttgcatttcaatagagccattttgaatatacagaaagggcgcacgtgattgttgaaaaaacgaatcgcaatagaaagtcctaaaaattctggagaaatcctgcatgtttgtcaatctatttatttatttattttctatgtcattaattttttattctgcgaccgttcagctttgcacccaactcataaccatcagcaaatgtaaagccatattaaaaatccgaaatcttatattgctataaatctcattactttctggaactcacttcgttttccaatattaacctttactatacgatcaaattacagacactacagccactatcattttaatgccactcgcactttcccaatattctcattattattcttaactctcaattctaatactaacacaggaattataatattcttattgaaaaaatccctcgatgttgcctgcatcgctgtttccaaactcaatctgatccaagagtacggcactctgcaaaaagtcaaagtcaaagtcgttgaatgcttgcaaatcgaaaccaagattgggtggaggaaagttgtccggacgagtctcagaaatggagacgttagacatctcaacaactggttctggcctctctactaccggagtagatccgctacttttttcaacatccgaaggcgagtccgaactatctctctggcgcttgatcacaccgcggatattactttcaatagcattatacccttgagacattgaacttctatcaagtgctgtatggtcaaatggacacttccttttcttagcatccactggcactggtgaagctgttgttacaatactgtggttaacaggacatttacccggcctggagtcgataggcgaactgtcttcgtctatgggtgtggtgatatgcgaaataggacatttcgtatattcctttgatgtaatcgctggtggcgttgagttcttgaagctcctaggtgttataactgggcaagacttcatatcaccagcagccccgattcctcggaattgcggaatgtttgcatgtatcttggcgtagttgatgcttgtcattctcttggaattacggacaaacgtcaaatagaacttccataacttcgagagtttaccagatttatccttatccaataagggactcttcgcaagcaagtctactgaatcctcaacaacgcctactatatgtgtcttaattaagtcttccatgctcattccgtaatcagaaattgccttgtcgccattgaaagccgaatacttgttgagctgaattcgcaatacagtttcttgtgacatcatattatcatcattcgaaactctcattagcaaagcaacaataatctggataagtctagtcaaaagttctgttatcgccagtaacacgtactgcttgttcatgccatcatggtcgttgataagttcttttctcaacagatcaatgatttcaagatacttggtaaaaatatccggaacagatgatgctaccaactcttcgtccatactttcctctgcctgtaataatataatgtacttcatgaagtatctgagatacattaacattgaaacgcattcaaatctacgtatatgcctcaatttccgtaatcctaaatctacaatccaggtactgcattgtctgatcaatgattccaaattggcgatagtcaatttgagatcgcctaccttcgaaatcccatgagctaaagcagatgagattctggcaatcaaatagtggagatgaagtgttatagttaattcatcaaatttatgggaattgagggaagtgatgtactttagatgatacagaagcagatctgcctcttctatctttgtatagagtctttgcaagaggttgtcaattgcttctgagtgttttatcaagggcacaaagttgaatccaaccaagttggccaatctgacaagatctgtccatatatagcacatatggattttcaagtctctgtttctttttctggcttcttgttccttgaagatgacgagctcagggtctttccataattcgactgtgccttcatcactcaatatagttttcaacaatacagtgaacaagcttgtgaaccctggctttggatctgaggttgcaccgtcttttttgtattcggcgacttcacgattaagcaatgttatataacaagctatggtgcaaagagacggagaagatgtttctgaaaacttcaagttggttatgtgcaacacaaactcctggactatgtacaaagtatttctgaacttggagccttgcccaacatagactacttccgtaggaaacaatgaacggaacttgaggccaatatcttcttctaaccccactttaacattcagtctcaaggtatccaacgactcctcgattatcaacgctaacatacacaagtagactcccttcatcttaaggcgctcgaaaagctgttcgtcagtcaatttaagactaggatcattggcaatatttatggatatctcattcccgttcttcttaattatactctgaatttctatcttgtagaaggagagtatatgcctcgattcgatgtcgtacaccttgttgttgaagtagaagtcgatgaggaaatagagctgtttgaaattgatcttttcgtttcctcgcaccaagttgagcgaggaatcccagaggttctgaaccttaagtaacaacgttcttcccttctccgatacgaggtcatgataagcgaattgctcctgttccgttccatactgatttggtactacagtgttgtacttccttggggtatcagtggatcgagccagaggaacaggagagcttatcccacctactggacttggtgtgatctggtcttctgtcatgaagttgaaatcgcactcgataactggacaccttaatttatttggctcttcagacttgaccacactgtaggtgaagtcgatttcgttgattctatagggtgatttcttcgacaaagggttggatgtgacagactggtttggtaagctgaaggctcccgggctgtttctagaagtgttgttcaacatgttcattttgtacatgtggtagatcttctggagatttgtgattttgaaccagagagtggtaagctgtggatccaatttaatcaagttgatccacgagtacgtatctatgtggttaactttagaactagtacgtcctattacactgtatgctggatcgtggtgaattgtgagtggatctcggttgttaacgagagagaggttcaacttcgtcaaaatcaagataggcttacagcccatagccgtggcatcgtggaccttcggcgagagctgctggagcaccgaaagctgtcgcttcaagtcgtcgatctcctttctttgagaaaggatgactttgtcagtatgcgctcgaaactgtttaaactcactcgtctcttcgatcttgacttgtagtaaagatgcgttcgcatcatgtgagtcttctgcgtcttctgccttcacctgagaactctttttcgaccacactggctccaaatactcgcaaagatgcggcacaccattcttgatacaccctgaacaggacggcttgcccttgtcacatttgaccttacgcttcttacagttgagacatgacacgggaactctgttccgctgtctctggcgtttctgttccatggttaccgttgcctgtgaagaagaaggtgccatttccgcgacggtatgtaactgtactacagtatgatatcgtaaggtagttatggtaagttaatccgatccggagatatcggggaagcaagtaggtaagtgtgtgtaatagtacttgagcactgtctctggacttgcgataaaggactctgccatgcttcggcactctgccaaatctcgcttactggtctaattggctgaaatcgagcagctgggcgaattaggaagtatccccgtcaagactctattactaatgctggagtctgtacgaaaagaccacagcgcaaccgatgcgaaacggctgatgtagccttagatcacgttatatgtatcacatgtgccatacaaatgaagaactgctagatcttaaatatatatagcaactgttctgggatacgagtctgttcttgcttcaagtaggagagaatagctactctgaaatatatccaaagagaagatcttttctgggagctttatacctttagtttgtccagtttcaaagtgatatgtaaagtatttcatctcattctgtttgcgtgggttaacacagcctgcttaattgaatttcagaagaattctgcgcaattgccttccttaatagacggagaagcacctttactcttcaagtagttgagatttgtgaaaaccgaaggaagaatcgctataactcatactgtaagtcttgagtcaaggactgtatagaccaactgatcggatctcggtcgcgtgacatatatcacctgacccatctcttcaagtttcaactattagacaaatctgagtagctacaactacattgtattctttgcttccgtagacaatgtccgctggtattcctgtcagattgcttaacgaggcccagggccacgtgatctcgctcgagcttaccactggtgatacataccgaggaaagctcttggaaaacgaagataacatgaatttgtcactttacgatgtagtgataacgaaaggcagaacgggtgctacttcatacatgaaccaggtgtttgtgagagggtcgatgattcgcttcatcactgtaccggatatattgaagaatgcgcctatgttctttatgaagccaggcgataaacctaaacctcctgtgagaggacctcctccaaagagaactaggcattgatataagaaaatgaaaatgaaaaatgttcaaattgaagatatatcagaaaagaaatcactatcagaagtatcagaaagaaaactgtagcagaaatggattacgagaagaacataaaacaagattctgagaatctgctataatagcttatacgctgtgatacattttgagaaagatcagacaatagaagctgtccacaagcatcttgtatctatatagatgtggactattgtacactaggggccatgtccatatatgtcttaatactaattagactaatataaaatatactcaattctcagttaatgcctatagtagatatataattacaagtgatggttaagcttaacagttagaccatggtgaccaactcttcagcagccgtaggatggatggccacacagttatcgaagtccttcttggtagctcccatcttcacggcgactccaaagccttgtaagatttcggcagaagagtctcccacaatgtgaagacctacgaccttttcttcaggaagcaaacagacgattctataagctgtaggcgacttgaattcgtcgtggtctaccaacccgtagtacatctgggtgaatttggagttgtacaccttgatattttcttcgccgtatttggcaatagcttccttggtggataaaccaatggaaccagcttcaggatgtgagaagatcaccgatggaacattattgtagtccaacttgtcctcggcgaagatctctggtccaaacaatctgttggacaacctacgaccagcagcaatggcaaccggagtcaattccactttgcctactacgtctccaagcgagaatatcttgggattggctgttctctggaactcatctgttgaaacttgcaacttatcgttgagttttacgccgaccttatctaagctgagatcaatcaacgattttctgcctacggtccagaccaactcatctacttctaaagtcttaccgttacccaaaaacaccttcttcttgccgtctgccgtcttttcaaccttagtgacaccaccggactgtttgtatatgttgatgcccaacttatctgtgtagtagtcggtgattgtagtctggatgatgtcatcaaacgacctcaatacggtgtcacctctgataatgaagtgggtttctgaacccaagccgttgaaaacaccagagaactcaactccaatataaccagctccaactacagccacagatttaggttgcttctctaattcaaagaacccatctgaagtgatacccaattcagcaccaggtacctttggaggaacaataggtgcacctccggtggcgatcaacactttcttaccagcaaatacaagcttctcatccttcttgaatgtcttgccctcttccaagaacttgatctcctggtctccagataacgtgacttctacatcgccctcggaattgatgaacttggcgtaaccaaagagatagttgacgccttctctgttcaagttgttctcatagattccattcaactttctgacgtaagcgtctctcttctctttcatcaaaccccagttgaaatccccgtacttgatttcttcctcggatgaagccaatccgtacgatttcatatggtgtttcttgtgagccaagtcagcagcgtgccacataagcttcttgggaacacagccgacattgacacaggtaccacccatcttgtggtatttaccttcgatcaacaatactcgagctccatatttggcagctctacgggctgaagcaactcctccagagccacctccaatcacgagatagtcaaatgtattgtgcgcagaaacaggagccattgtggagacagaagtagataaatgtttgtggatagtttgcaaacgggtagtggatgacttcaagatgttggacgcggaatttcttatcattatatacccttcggcaccgttcttctccagagtcaattgtgcgagatgaagggggtatcgagaaaatttcattccaccgtttgtaatcaagcggaggaggaccggaagtggcgttgtcacgtgcctgatcaactattatctatggaaattctaagttggtatagcccagaatcataatgataataataaataataataattaagagatgctgatctcaaagatgtggatgacgctacggctgggtcacttccatgacactctcttttgaacttggtatatattgtatttttctaggagtttccatggacggtcattttccgattaattctcgaaatttgagagtctcgctaaagtcgcaggatgcaccggaagttctcactaatcgcactagaactggaccagaatttctaatcagtggagattctctcacttcgcactacactactaaaccgatctctactacagttttccatattgaccatctctattggtattggctcgttaactactttattaagagtttgtgtaatctgctatccccgctagaaatcgtcctggttatacccgtcgtccacttcgtttttgatacactttcggagaaaagataacgtaaatagttgcaactcttcattaatgctgctggcgtccaagtcatcgtcttcctctaaggcgcgacttgaagacggcaggtgttcagccaaatcatgttcagccaaatagccgtcgtagagtttgtcaagtttacgagatgtcacgctgtggaacttatcgtagtcaaaatctgtagctgctaacaacggactcatattgacgttcatgttactactgttcatgttcatattagagcctcttcttcttttatgcttgatattgctaccgatggaactgttctttagatctcgcaaggaaagttttgtttcttctagagcctgtagcgaggctctttcttcgtctaagagcgacttgatttcgtctctgtcttcatggaaaattttctgtagattggccgtattgtcaatagacgaataggacgagttgttggtaatatactcctggttcaacgagttgctgtagccaaatagacgctgaaggacttctttcttctgactgatttgcaactgccttctagtagagacagaatgagcctgggaaaaaagcctttcctggttcatttgcacctgtttcttgtactcatagagtagatgctttgtatcagtgttgcttctactgctggaaacactagtgtgctgtaaactggaatagctgctctggatgatatccaattctccacgagtatagcccgggatcgcctggatcacgttgtttttacgcagatttactttgctagacctgctagcttccgtatgttcgtcttcatcaagttcatcgatatcatcttcagattcactcgaattgccaaagatcacattggtactgatcctttcggccagttcccatgactttatctgggattcctttatggccggtggtaaatgttcgccgtgctggaggtctatttccgtcgggtaatttgtgaaaactgaatagtcatagccattcatatttataggtttgcgaattatgaaactcggcacggatttgttggggtggctatcatcgatgtcatgaatgacgtttctactgactacttccatgtcgtctgaaccatctgcgactttttgcttcagcagctggtgcaaattcaacaacttcgatttgatcaaacgaccattgcgagacgatttcagagaaagcaccttaccgctattactattactggcattgttagtgttcccatagttcactttatcttgtcgttggcggaaacgtcgtatgttgttgctcggagtgcttaccatagaagatgaagacgaaacagaacgcgtggtatcgttggtgtttatgaatgtcgtcgaagtatctactgcagctgctagatgtgcggaagatactcgtgatgtcgggttgatgctaaacttagggaggttatattttgacgatgaggaatagttgggattgtttgtggaagaattcatagtgaatagttattattaatgaagaatgtgaatgaaaatatggtatgagacaatagggtattcaataatgtctacttgtttaatcgtctttggtgaaacttcgtattcgtctagttcttgcaaatagttgatatcgacaaactgatgacgtgatagaatggttgatatataaaatttgacaactttaatacggcctgatgctatactatgatatgaacaatgatgttattggtcaataatgatattaggaaaaatgccagataagtttaagatattcgtacagaacagaatgaatttgtaaccaaatgaatattgcagaaaaccaaactttgaatggctcaaaaaccttccaagatcctcgatatctacagaaatatcaatcttgtatcacaccaagttactgatatggttcttttggggaacaactcaaacacttttgtcgttttgtctgttatcacgctttggatatactgagtgtttctattctgcttggatgtccgattctgttgcagacacagcttcaggttctggaaacaaatgtttggattcactctccaaatccacgacgctgcgtaattggttttgtctgagatgtaagctttgttgaactactaactggttttggcacaattccataaggtttagtagacttatttaattacaaaaatgagttactgtatacagatgaaggttatccacaaacagagtgttgactgcccaattgggcaaggtgtggcagatgactgcggaattgggactatgagggaaagaatgagaagttgtcctatgtcgcaaagattgtctcatcataaatgtctcctgatgttattttcttatgtaatcatatgtcttagatttgcattatatgccatacgcattggctgttgattgcactcgggttctttttttaatgctacatcctaaagcgctatcacgtgctatttctggcactccttctctactttagggcttcagccctaacactcactttttccactctatgtacaggtccatctatctcagttaattagtatgcagtttcgtccatactacccttttgcaggcagaattctcacactgtgaggttcgcattttctcactgcgaacaaaaaaagttcttaaaaattttcattcttactgttttcttacaaagttacctattgagtattaagcaaagatggctactgaattaaccgttcaatccgaaagagctttccaaaaggttcgtagatatcatagtggaagaataatccgcaacagcactgcgatttgacagagaattcgtcgagaaatagaccaccaaattcgtaagaatccccataatggagacactgaaaaattatcggaagtcgaacacagataacatacctccaaacaaagaggcacataagagtagagaatcaagtgaatgatgtcacagtgtaatgtcgacaaataatgaaatgaaaatgggctaaattggatatagtaatgatcaatgaaataccaaatcatcaactgaaaaattatcatcattactgtgaagaatgcacatcgtcttcattcagtaagaacacacatcaatatcttgagggacaataagttgtcgcgatatcatttggcaatttcaatattaatttttgacacttcagtaaaattttcaaatccacacttcaaatcttgaacgaactctgtcagcagcagcatctcaataagatcgccatactaacatcttctagcaaccacacatctttaccaacccaaaggccaaggccaacagaaagaccaagagatggtacaaggacattggtttaggtttcaagaccccaaagaccgccattgaaggtacttacattgacaagaagtgtccattcgttggtactgtctccatcagaggtaagatcttgaccggtactgttgtctccaccaaaatgcacagaactatcatcatcagaagagactacttgcactacgttccaaaatataacagatacgaaaagagacacaagaacgtcgctgctcacgtttccccagctttccgtgtccaagaaggtgatgtcgttaccgttggtcaatgtagaccaatctctaagaccgttagattcaacgtcatcaaggttgccgctgctgcttccaagtccaagcaattcactaagttctaaacagctaacaaaacgttaatatgatttcaaaaactgaagacgtctctcccgagatggtctagtatatatagtatttatataagttttgtttctgttttattagggtctttttcttttaatgttacattagtcttataatcagttcattgtaaattctgaaattgcatgcttcggcattactagctcatagatatctatgtcttcaatcttaaagaagcctcttccgctaacgaaaatgaatacttatcatggcatgtactctctttacctcatcataaagtcaattacttattctatactgtccgtgcactcataaagtatggagtggtctttatattgattcgtctctctcgagacattcaactattttcttaatacaaaattacaccatctctactacaagttggatggggcatctatctttttgactaccatcttttttccaccccattcggctaacaacagtaacaactcgcccagctcatgaagcttgaccaagtcgtcacatccacctctgctttcggtggttgctccaacaatgacatttggtacagtcgatctacctgtgacttcaccaatgtatgtctgcaattcacgaccgttcaggtgcttgtcaagttcgacaatctgaggctctggggtaatctggtagttgtccttaagcaactccttgagtcttttcgagaaaggacagtaagacttggagaatatagtcataggtgcaagcgttctgatttccaagaacgattgtgcgggatcaaatggcttgtcctcagaaacttctggttttccttcgtctgcttcatccacattgttctcggaaagtaaaatcttctgatttatagcatcatctttcttgtcgtcgttctgagagtcgataatgttatttgtagtcactacttgagcaacggaattggtcgaggtgtcagaaccggaagatctgtagagaacgaaaaccaataaaatgaacaacgaggccacagccactagtcttgtttgtttcaccttgaacattacaatgatatatggacagaggtcgggaatgtgaatgtgaaatgtgaaatgtgaaatggaaacagcaaagcaaccaagttatattaagcaaaggcggattaatataaggcagaactcgaaacagcaaattcagccgatatgttccttaaatataacagagcaagatccaaatatttagattagcataagctgataaaaaaggacaatagaaaaacaaaattgatagccagatttgctgtggaataaacttccaacaacgtgaaattttcctacatctcgtgtcagacaatagtagtgtgtggaaagagacgtgtttggaattgtcgcggaagcgtatagcaaaacagcacacgataatagagagtgaagatgagaaatggatctggagaacaatggaagagacacgttagatggtagtcttgagtttttccacattgggcttgctcggcttcttcgtcctgttcttctgcgtgagttaagtgctgaagtacattttgtatggcaattgtggtgttagctctacatagtgaactctatatagtgaactctatattgtgaagctagcgagcttactattcgttgatagacataaacagaatatgtattctgacaataaatactgaatacatatatgttaatactgaattactttatggttcgtgttgaaatttaaatactcttctcgctacggattcaagttattttgcaattttgacttttgataaatttatatttcctgcgagtttgacaccatattttgcaaaataattaattttacaatttctacttggtccatgaattctcttatctcctccatttgtagtcatctactcctgaatcgtaaattcaggggtggaattacaccccgaatacataccccaactttcactgggactattgcactcatatagataccttcagcgtatggtgattactaactaccttaattctgtaattgtcccaattagatcactatatcatcaataaccttcaacaaagtctagacaaaagttcgctgaatttcagacaaagcatttttcagcttctctactcaccaactcacctacagtttttcaattcccgatatattactttaatggtaaaatctcaatttccaataattaccgagaggtacatatccctcttctcggaccagtgtactccctatagctctctccagtgtgatcacttaccgataattgcctacaacagcatttaaatttggatcgcatttagaagtcgtgtgacaaaagtccaattgataaaaataacaattgaaaatacggagaagtgtgggctagtcctatgctggtatgcggaattgagaatgaaacagttgagcagacgaggctcaggccgcgaggttctcattgttccagcaatttatgagtctctcccaagaattgactcaagtcccactcgtaaaggttgcggcagctggtgaaatgttcacggcaggtgagactcccagtttggaaacaatcttgacgctgcatggctaaagctgaaagcagccgcttcgtgcaagtagaccccgagctgcttacagggcatttgattttttacgctgaactattttcacagttcattttagagttagtgcaattttttgatttttcgattcttgacattttcatttttgaagcgcatctcctcatccccattgagccttaatattgctaggtgattcagcagttccttcgaaggctctctggcggaatccctccctgccttattaatgtggtggttctggccagaagtcagaccattgttattgtaagctaggttgttcccgcggtgcttcgggagttggagccgtagtgtcacacgaacacaagccccttgtggatagccctcgtgtgctcaattgtcatctttggataggactgcagattttgcacaagcgaattgaacacaactggtgcaggcactttactttttctgattattattgacaaaatgtcactagaccacagtctgccagaaacgtgggtgcgatgagaagggatcgcctgggtcgcgatatacgagttgacagctatggaggcgttgaaaacgtcagcgaccttctagactgcaatgaagagctctcggctggacctgggtcatgttcacgtgcccattgggtttcttttgcgagactctcgatctcgcaatgacagaatctccccagttttctctcgtagcaagatgttatctgctaatgaaaacggctccgctgagtgagcgggtattttttctgcgatccacagatgctgcagctcagtctgatattatgcaaagcaagcgaaaataatttccttcatgcatacaggagaagataaatggtgtaaagaaggatccacgtgggtcgtggacacaccagggaacgtgggctatcttctatcgcagccaagaaagttgcgaaaaagtttatttttctggggagcacacgtgggctgcaaaaaaggattgcggctgcaagatctagtgcgagcgttttgagcctggcgaccagactgttccagcgagaatcagggagaccacacagaaattagggagaccgtttgaaattgcgacagaacaaccgcgaggagaaggtacttgcaaagagcatgaattgtacaaaagaagagtagcggggagctgtttggcccagctttagtgttgatgggttgtgaaacaagcaagaacaaaactcagacccagatgggtccattatcagatcaaatggcgggcagacgcattcaggataatagtgacagatttagaacgagagccagtagctgtagcgagagaattgctgcacccgtggcgagagactggtgtttgtcgccgtgagaaattcacagtaatcgcaggaagcagaataaacaccagaagacactaacaatgcccgaagcgagagtagcgagacacccctactgttaccaatgtctaccagtatcttctctccaggacctcagtatcttgtagctaccttcctcttactctaccagctctcaccccctcctttcaacgcgaactgttacaattgacaatagactgaactcacattcgttatctcctcgagccacactccctatcggtacaactgtgctgttggagagatttcttgtccgtctgcgttcctgttcacatgagtccacggtgtcggggtcgtacgtgattgcccctaaagcgtacccctaattggcttactggaggaggtgttggaattttgcaaccaaattaacctttcagaagtgtgtctcatgacaagaaaaacaagaaaaacaagaaacttattgccagtttatactgaactggagttgcccagagtttctttcaaatacgcggccgcaccgtcgactgctgttctaaagcaaatgaatttatatatatatgaggttggaaccctgttgagaacgaaaaagacggccacttcagagaatcgagaatacttttcttccttctcataggcttcatttcgtttgaggttttgtccctaaagcctccctatgatttaatcagcgtaccacggggtcagttgaaaattgctccccattttcggcgatttcctggcgacaaaatcagcatgcgtagcaaacgtaatcgcaccgccgccgaagctctcactaaacttcgctggtcggtgctggcgcctgcttaattatgggcaacggtttctgttgcttgtgctacggggcggttaaccgttctattatcatacccagtctaactgactgttccggctgcattagcaccagaattaccttaactaaggaggaatgaaaactggctggcaatttcgaatgtggaccccattctctggcatattcctctttcgtcgagtgctccttccttgtagaggttggtgtgtgaacactgaagaggtgaaattgtaagattggcggatttagcgacgctttgggatggtggataacggttttcccattctgataagtagatcgcgtacacttcgttattagtgaaaccggcgtgagcacggccccaatgaattcctctcggtgctctcgtggccaataattatactgctttttgttgtattattctgcattcctcttgcatggatgcaagtgagttctagtgccgttcgtgggtgaagcatatgaaacctaaaaaagaaactggacataatatgcctttctagcctattattacctccatttcacaacggcccacgagactctgcaaactgctagacgctttttcgataccgtttcaaggagacatacgcaggctaagcaccatagccaatgccttagacaagcagacactcgcaccataatgttgtacggggcaatttctccgttgctatttcaacccgtgacaattccgcacccaaagagtttctttttcttcttgcttctcctaacagattatctgtcgccattctcttggcaggccctgatctagtcaacagcgccatatcgctgggcaagacgtgcaaaaaagcactttctcatggatatatcccttaaggcactttgaaagttttttttttttggcactccattttaatttctgcctcgtaatcgtggttgcagaaaataaattattttggaggattgtgcgcagtccgtcaattctaaattaaaaaatacctaatttattaaacacccatacaatactgagaagagcgcaggaaaggaatttactggctagcaccagctgaagcgcctatactgaagggcagaattttttcaagtgcccagggtgttttgtataaataagcaccaattcccgttttcaacaagcaaaatgtcatcttgttttcttcttctatcatcaatagatccagtaagtctgaataactaaacatgtctgacattaacgaaactgaagcctaccacgaaaacaactctggtggtaagactgccttcaaggactacttgggtaagtttgcccacattgaagatccattggaaagaagaagattggccttggaagaaattgataaggccggttttggatggactcaagtcaagatgatcatgattgccggtgtcggtttcatgaccgattcctacgatatcttcgccatcaacttgggtcttaccatgttgggttacgtctactggaagggtaccatcccagcctctacccaaaccttgttgaaggtttctacctctgtcggtaccgttatcggtcaagtcggtttcggtactgttgctgatatggtcggtcgtaaggctatttacggtttggaattgattgtcattatcgctgccactattttgcaatgtactgttggtcaatctcctgccattgaattcgtcggtatctttgctaccttgagaatcctcatgggtatcggtatcggtggtgactacccattgtcttctattatctctgccgaattcgctaccaccaagtggagaggtgctattatggctgccgttttctccaaccagggtttgggtcaattgtttgccggtatcgttgccatgattaccatcgctgcctacaagagcgatttggaatacgctacctctgctgctctctgtgaccacagatgtatcaaggcttgtgaccagatgtggagaattcttatcggtttcggttgtgttccaggttgtattgccttgtactacagattgaccattgccgaatctccaagatactcccttgatgtcaacgaacacgacgatctcgaaaaggttgccgacgccgaagctcaaatcgacgaacacgctgctgaaatcgctgctccaaaggcttctttccgcgacttcattgcccacttctctcaatggaaatacggtaagatcttgttgggtactgccggttcttggttcatgttggatgttgcttactacggtttgtctttgaacactgccatcatcttgcaaaccattggttacgcttcttctgccaacgtctaccaaaagttgtacgactctgctgccggtaacttgattttgatctgtgccggtgccttgccaggttactggttgtctgttgctaccatcgataccgttggtagaaagccaatccaagttggtggtttcttgcttttgaccatcatcttgtgtatcattggtttcgcttaccacaagttgtctgaaggtggtttgttggctttgtacattcttgctcaattgttccagaacttcggaccaaacaccactactttcatcattccaggtgaaattttcccaactagatacagatccactgctcatggtatctctgctgcctctggtaaggttggtgccatcatcgcacaaacctgtcttggtaccttgattaaccacggttgtgctaaggacaagccaaactgttggttaaaccacgtcatgcaaatcttcgccttgttcatgttcattggtatcttcctttccttgttgctcccagaaactaagagaaagaccttggaagaaatcactgaaaagtaccacggtgaaattgatgccaccaagttgggcaaggacagatacattcctactgcccaagaagaatcctacgattccgacttgaagcaataggttatgtatacatcatctacatcatctccaatataaaaaatgcaatgctaggcttttaccagattttttaatactccactaccactcatttttcttcatttcaagatacatcaccggatctgaattcggttttacatactaattggtttataaagcgttcttttatatattaattcacgaggctacactgtttaactatgatctgtaaatttagatggctgtcctgtaagctttagtcacttcagcataagcttcgaagcatagactcgataagcgagaagattcttattatcatcttgtaagtctctactcttatggattgttaagcgagttgaaacttcctaggactgatctgaaatttggtaagccattgtatccctagtaaaaatatcatgatatgaaaacttcaattattccataatattatttgtcccttctcctggaaccatgcatgggcttatccttaagggaaaaaccatctgcacacagacttttagtaccccacgaggccttcatccttttcttatcgaagggatagcattttgctttaattggggggtaattcacttcagtttgctacgatgtggacgaagtcctcaaactatgcttattgtgagcaagaattccagacattgcccgattttgacaacgttgacattgttctgtgtcaaaaaatcttgggcccaagaattttcaaatttgttcagcatgagatcttaacttccattatcatatcggtgaaactttatcccacggctcttttagaaaagtaataaaatacccttttcgtgtcgtgaactcaaacaagccctgaatgtggggacggagccataagagtgccgtgccaataaaacgttttgagccactagcttatggaattataagagactcttttattattgtagcggcaagagccgatgtatatttcttttttaagggctggaagtatccgcctttacttacacctgcagctgcatggcataaccgctgatggggtgaaataataacaagctttttagacatctggattgactattttgtatgtacaaatttgcatcggtatgtcttaactaatcgacacacacgtgttgcacttatttctttttagtcccgtaattgatgcctttttgggacaaatccgctgaatctgtaccgcttctgtacttttagctacaagaaaggattcctgtcaggttcgggtatgcatcgaaagtgaggcaggttaattggacatgcaactagtttgataattttttcagctttttcctacagagagaatacagggatttcttacgaagtttgaaaagtgtatattgtttagaagagatacttccattaatttggtaaattgtaaatggagatgtcttagactggcacattggcaagcttgtaggtttgtttgtatgtacatttactcctagatgagtagaaaagtcagtctctgaagacaggtttcaaatagtgttctgtatcttgaaggtactattcatacccattcagagtcccattgaacctaaactagtacgtagagtttagggttgtagaaattgctgtgggcaaaaagaaattggagaaactcttcaagagcatcgacaagttggacaatgatttgatttgattcatcaacttgttcatgataacttacacttctgaaattgtatgttcgaagaaacatcaagtatacccttaggtaaacgtcctctgttagtgtatagttatcttgaatagacttataaccataatgggctgttttccagaaaaatgtaaggagtacttggttactgccaatgttagttatatctgacggtaaagaaatttggtaagacttacatgtccatcaagtcggcgtcaaagaagtattctgacatagaggaatgtatgttctggattgaacgcaagtacttcatagccctgtagcaaatccgctgaacttcatcttccacagagtttcttaatgagggcactttactgagtatcgcagtaagcggagaatgagggtatcgggaagttatcggtgatataaagcggaacacagcttctggcgacctgagtgtaaatggtttcatagccatgacgagaagtcttttccaagtttgatcctaggatgaacagttcaaaaaagaactggaattgcgtttgtggacaagcggttatagggtcgcagaattttgcacccaaaaagatcgagagcgagcgtggacacagaaagaagaaaacagagcttcaatatacacgaaaaaattcgataagcaatttccaaatagaatttgagattgaagaagcagaactgttctgatcggcttagataaagcaatcaggatagcaaaagtttagttacagacttttgggggatctacttagataagacatcacgtgacacaacattttctctatttatgctgttccaaaactttctattttattacttttacaaacatccgaactgttggatcgtgtgaacgataaactacagttttcacacaaataatgccatactattatgacgccagatatcgagggcaaactccgacattgactccgacgtcgactcctatctcgtaacggcctgcatacagaaccacacatttttgcgagcgaagcgcattttccaccaacctaattatcccacactctctggcccagtttgatttgataatgtgccactttttctttagagaagttggagataggaaaacactcatacgcgtctgttagaaccgagcgagttttctcatagttaaattttgttgttgagtttcagaaacaaactggccgattgtttgagttgattaaacgattcccatacaagtttgattcaccccttatagatctttttcaatctcgtgcatccaaaagctttaagaagtttcataattttcacagcttaatatttacccatttgtaataggcgttgtgattacagatagtcacagcaatatttcaaactcttttcagcgttcgccacattccacgtatcaaaagatatctagtgtacttccggctttttgtttgctccaagtgtcagtttcatatattctgagccatcaattccatcgactcaattgattctagtggaatttttcaaatttgttcatttttcagattctccacactttgataccttcatctttcagccttcattcctcaattttcagcaatggctcctcctaccagacctaccagtgccggggctagactccagaaacttgcattaacacaacagttctactggttccttggtcatgtgatggccgttctcttttttgcagtttccaccatcagttcgtttatctttcctcgttcatcgcttaagtactacaggttttcgcttttatcgatcctcgtgacttacgtcattgtgatcaagcagatttaccttcgtaagcttctgactgtgacagccactcgtctcattcgtgacgaaaacgtccagtactttgttcttgctggagtgttctacttggcttccttcaagataggcgtcgtggctggttcgctttactcatttgccatttttgctgtgtttcacattctcacatactttcagaacaacttgttgtcgattgtattggccaatcctcaggctcaacagcaggtgaatgccactatcaaccagtttaccactaactacaaccagcaggcacttatagttgcagccaatgctgaagccatgcttctcgtgttgaacgttttcctggttttcctggcatttttgttcaacttggtgctccaacgtgacattgtctacttcttggtcaagttatgggtagctgctataactgtagtgtttgtaaagttcagattcgactctaaccagtacaccaagcttgtaatccaacagtttgatctcaagatcagcgaattgttggcaagattcaacagtacagccttgaacaacttgtacaatgtctcgttcaagagccaattccttcctcactacattgcacctattcaagtgcccaaggaaaacatcaaaaagacatgattttggccagagtacgatgttggtcatagtgcgacatttggacaggtattgataagatgtcgcactttaatttcactatcagagtctcattatacaaatcatcatggtctgccgagtgccatggcaatatatttatacatctgaacttctgtcacaacctagccatcactatgctggaatcagcatcccaaatccttttctctatttttacctgtaaagttatagtcaatatattaattatttaagcctcgttgtgtaaatgtcgcattttgaaatatcttgttgaggagatccacgacatcgccaatgaaccactttctagttggctcgttaagaaacgtaacgtgaaccaagctattttgcgataaccattttgttattactatggcatctcaaagttcgaagaagacggctcaggccaataccactaccttgaaccaattgcatgctatctctgctggcataaacttggccgttctcatcatcgtctacttctttagaagaccatccaactacaaaccatgggtgctcttttcacttccttcctggtttttccagtatactttggagaagtctggtcgtccaacttaccaaggcaacaaacttgtaagatctggtgaagatattcatcatgaagggttgtatgaatacttcttcgatatcatctatgttacatggatcttggatatcctcatggtaatcttgggcaccaactacgtgtggtttctctacttggctatcccaggttatgcaggctacaagatctttggcgtagctgcaccttttttgaagaaatccaaaccagctaaagcagaagcttcttcagagacttctggtgctgactccaagagtaagcgtcagactaagttggaagctagaagagaaaagggccagggccaggtgcggtacagataagtcacaaaatagacttgaaagaaacgaatagtgaatatttgatgatgtactgtcgcaatcgtccaaagtaccattttacttcatcaaagctctattattgtaacttgaatctgtattcagtgattgtgaatatcgaacatgtggaactaaaaacagaacaaccacagcttttcaaaattgtttatattataaccacctccaacgtctagtgtatatagtatataatagttataacgtgacattacgatccagcaacaacagttggcaaagattataatttaagtagaagtgagaagggctgcgaaatcagaccgaattaaaaatttgacatattgacagaataagcagacactcaattattagaaacattaacgattagtatagtaagtacgggatagctttataaaaactgcaacagttcgaatagcaccagtattatcttgtttaatatcagccacacacgacgctcataaaatctggtggcagatttcgcaaacatttttcttaaaggttttagcttggtgaacactatcaaaaaatctcaaagtggaaaatcccaaagtgaaaaactcaatttctacgatccaccactttcttgtcatttccccataaaattacaccagaagaaatgggtaaagtgtccgacctagagtcgttcatagacgttgcctcagacttgctttctgcttatccgagttcaactacactttcaataacttatacaaatgtcgccaagaagagtaaagattccaaagtcactaaacctaacacgaagaaagcttccaatgctgttcatttcaagttatttgagcccaagtctggtaagtgcatcaagtataacacatacaagatcaaagagttgtcacgtcttttggcattcatcggacctcgtggtgtaaacgtagtaacatccacttctactggccaagaccatgtagatggtttggcttccatcatgagtaatgtcaagtatagcaacgaagacgaaaatgtagcagtttcaagcacggcaaatgtagcagccaattcaggtattgaaactcctgaagaattcagtcatgatactactcctgttccagcatcaaaacccgcaaccgcttcgaagaagaaaaacaagaagaaaaagggaaagaagtaacctaagaatataaaataagttgaagaatcccaccaaatgatctttccttgaaagacaacatttcgactaaagatgaacatttacgtaagtatatacatgtagcatctacgactaaactaatgcaaattgaaaagaacaaaaagtagtattctggactatgtaggaaattaaatagtagacaaccaacaatcaagcgacagagaacaggaatcaggatcccactttcttgccagagaagaagaaaaggcaaacggtatatcgattcatagatacatgtacaattagacagaagtgaagcgggattaaataaaggggttttaaagacagacaatccttttcttttgggcatatgcttgattggataaaagtgaaagtggaagaatagcaaagataaaagccatcaatgaaagttcaaaccttcaaagagtgagagttcaaactaaagttaacatagttaactattgcttcaaggctctatctatgataagcgaaatacaaagacaacctccactgaagctagtagcggaacaagcttctgaatctggaaatgagagtatctctctttccttgcgattccttgctagtaccaatatcgactggactgcttctttcaggactggcagggtaaccaccgggagccttcaagatctcaacgacgtcgttggcagtattgtttttgtctgtggttccagtggtgacgttactcaaagtagcatcagaatcctgggctactaactttggcttatttccactggcaaacgagttctctctcgagttgatagaagtgtcaccagtgctaaaactgcctttgttagaggtggaagatggggtggcaggaacagagacagtgtccttgcccttgttcaaaaccgccgagttaaatagagagttggtaggagtattgtactgatcgtcatcaccttcgtcgtgagcagaagtgacgatgtcgcggtgagaatcaagatgctcataatcattagtgccgtcactagaactcggaattgaaacggctgcaaacgaagacgaagacgtaagcacttgggtcaagttttggtctttggacttgacgtcttcgagatccagaagaatatcatcctcgactttaacaggtaaagaaacaacttcgggagcctcagaaatgtgatgaatttcaggctcagcgtcctcgggaacttcaacaacctccggagcttccacttcttctggaacgttaacaacatcttcagcgagttctttaatagaatctcctgggacttcctcagtaactggaattatttctgaaacttctggaataacttctttagcttccttaatcttttcaacttctttagttacttctggaacctcagtcttggttgcagctactgggataacggcagcttctggttcttcctcaaactcgtggaactcggtcaactcagcagcttcaatgacgttgttggcgattccgctgtcgtcatgttcagtcttgtagaagtcactggtgacccaatcgttgccgttaacaataaacttgaagacgagcttctggcgagaatcaactttgactacttgctggtagccgtcctcgaaggcggatttggcgggaaggctccgggaccagttatcgaagctcccggtgatctggagcgaatggatctggtccgtgttcacatggggcctacatagttagtataactgatacgataagagatatggtatgatctgagagacgcttcgcacaactgcagaagacgcaattggcgtgcctcgccgctgaaaacaacaccatcatgtttgtctggctctgacgagtgcaacggtagcatgaacagggggagatgacttagcggatacagcgctaggtgtgttctgcgctgctgggcccattcgcagggaaatgtgtgaaaaaatcagtgtcgcagcagcgaaaaattccagatcagataagcgtggttcagggatgtgctgattatgtaggacgatacgtaccactcgatggtgtaagtataggagggcattctataagaaaccgtgtagagcggaagagtagaaagaaaagtagaaagaacagggtagaaaacaaaaagcagaaaatgtggattaacaagaagcagaagaaaagaaaagaatatcaatcagacgaacccagaatcccgatccttaactcttactttaataataatacgcaaccacaagaggcgcacccaaaagtgcacaaaattgaatgtgtaaatggatttttttctgatctcttatcacagaagaggggagctgcagaaaacagatagaacagcaggagtggaagcagatgagaccgtcggagacttgagatctggatcatacagtgtacggcccgtgaatttcgaccagctccttggtctgtggttccacgcggcacacgttttgcagagacgatttttgtatgtgtttttgtctctgataaagaattgcgaaagctgattccaaagttggttcagatatgattcaattcgcgaaaaaaagttgtaccagaatttccacgagttgactaccataattcggtgtttcagctcgagaaaactgcatctgggcatcccgtacgaaggggttgtcaatcagataacgtcatgtgacacacaaccgggagcaccatgctacgacacacccagggcttccaaagggctgaactggtgtatggacctgatctgtctttcaggagacctcatctcatcttgctcacgtgagaccaacatttccacatctacagcccactgcaatcaagtgtaggcttctccacgtgacaggagctgcttcaggcgaatgaaatagtggctacacattccatattgtgttcagaaggagtcgttcacaaagaaccatctagacgtggttcacccattattttttaattgccaagctctgctgtataattctctactaattctctactaattggaaaaatagttgtttatttgtttacgtttatggctttttctggatttgacgtgttttgttgtgaatagtgatgagccaaacaggaccacaaaatccttcccatctcaagcgttcgaacatcggatttggctctcggcgtacaaatggctccagtatggaagcacgtctcggaagtatggatctactttgaaatcgctagttgtctctaaaattaagtatcattctcttgatctagtctaattgtaatatttaactctaatataaatggacgccacggccaccaaacggtagataaccacacaggcgatgagtcctgcaaacattgcacccaaatcattgtccaaattatagtaactcaacacatctgctcccgtgttcaagctgcattgctctacattgcactcgaaaagctggtcggtaaacccaagtttggcacagatcccaacggcatatttcatgggactgatatagttgattcccttgaaaaatggtggcatatggagcgacatcgtccctcccataaaaatggctagaatgacaaagttggtcaagatattgacggctacccccatatggttgaagcaactgttaaccataatcccaagcgattctccaacgttgatggaaataaaccctgtagcaaacatactgaagaacatcccagcagttcgaggtaatccacagacaaatacaatgagagcactaaagaagaggcaggggacaatttctgtaggaagctcattaagcaagtaggaaatgctgaactcaaacactccatatgtaccgtccttgtattcttggtagaacaagtttctctcgaacgggtaaagtgtgatgttgttgaccaacccgacaaagtaaaggttcaacacttcttggattaaacccaatctgttcgaaataccatcctgggtattcctcaatggcgcaaagaataaagtgtgaactatggtcaaaaatatggtctgaccagctctagatatgacaacgtccttagcacggtaagatgtaagtacctggcgacttgctatggcaggaaatgtaacatacatcggtaatctcttgtggtagtagtttctgatatcgactatgttgtgagatgtgactcttgtatcagaacctcccttaagcttccattgattgatcaagtcatctattcttgcctgggagatttccttttcctcattgaagttcttgctaactaagtcaagaatgtagtcagcaatattcatatcatcggggaccttgtagttcatgcttgcaagatatttttctattcctccagaagtcccattgtaaactactttacccccacgagccaataggagcaacgatccaaacttacggaacatttcttcacaaggctggtgaatggtcaaaataactgtagttttgttttcttcagccaatttatgtagcaaattcatgattgtgaccgaggtcgaagagtccaaccctgatgttggctcatcaagaaacaatatcttgggcctggacaacaactgaattgcaatagaaactcttctcttttcgccaccactaattcccttaacaaattcagatccaatcaatgtctcagcacagtcaatcaatcccgttgttctaattagggaattgattatatgtggaatatgtacatgctcttcaactggcaatctgactttagcttgataatacaaggtttctctaactgtcaagttgtggatcaaggaattatcatgctgagtgacgtatgcggatgcctttgctaattgttctggagtaatgtcgataaagttgtttaattgaagttgtccattggaagcatatgaggtagacttaggcaacctattggaaaggtaatttagaagtgtagttttgccacttcctgaagggcccattatgacattcacttcgctggctgcaaatgaagcagatacattgtccaatagggttttctcgaagactacttttctaagaagtgacttcttctgcacattgagagtgacattttggacattaacctcaagatcttcattatcttgtgctatagcatcatcgtcatcatccgaacatttctctttggtaatggcttggtcatgggggccatcttcccctccaatcttgttcttcttggttttggcgatggaaacatcaaaggatttgaagtagaaaacgaaaaatgtcatcaagttgaagccaacaaaccacacaaccaaaatccctattggttcagcaatccagtcaataggataccccaagttttttaattgatagtcaccagagtattgttcacatctagggtcatcattgtcgtatgggcagtcacccatccaaccagaaaactgatttgccaaaagtgctccgaagccataccagaagtaggcaatgtacttcacccatctgacatagacaggcatagtccttgcattgacaaagtacccacaagcactattttgtaattggtagaaaacattaacaaccaatgacgagatagaatagtctggagaaacagcaaagcaaaacatggatgctgacatggaaattaactccactaatagtgttatagcaaaatagataccaaagtatgaagaatcagtaggtccgccttgttctgtagacatcctcaatccccacatgaagttcgatatcacggcaaaaattaaagaaacaggcaaatcttccaagaagaactttgcaaaccgtctggaaagtatgaagccagtgatgctgacatagttttccaggtactcacggtaaaaaaacacaccatcagttgtccataacctctcaatttcgaaaaacatcgggcagaaagcgacaacttccaacattacatagagaaccgatgttatcgatcttataccagccaaatctgcctttggcttgaaaaacatccagccagtagcgacagccaatagcgccgaaccaacgttcatggctagaacagaaagaacatcacgataagaaagaacaaaagatcgtttggtaagaaccaccaactccctcataaacgaaatcttatcttcttttcttctacggaacatctttaagttagcttcaaattggccactttctgacgtttcaagaggaataagttcgtgttttctgcaggctttccattgctggaccaaattgttgattcttaatatagcttgctcttcggcttcccttgaggaggtatctttgactgacaagtccattatgtaatctatgaaggtggtgtcattcttgtgatcaacatctgatattcctagagtcttgaagtaggtgccggcatcaagcaaatttccaaagtagactactcggccacctcttgtcaatagacataatttatcaaataaagcagttatttctggtcttggttggtggatagagataacgatggttatgccgaattcaggagaagcaagcttcttgagggtatgaaccaacttcaacgagctggtggtatccaaccccgtagtaggttcatctagaaataacaccgaaggtttagaaagtaattgtatagccaatgaaactcttctctgttcacctcctgacaaacttgtggcatgagatgagaatgcagccactctagagtctcgaatgagttgtaactccaagacatctatcaacgactctatatactgaattttctcgaattcgctgacactaggtggaagcctgagatcagcctgagtcttcaacgtttcatatactgaaagtcccggaaggaaaatatccgtctgttgcatataggcatgttttatatttgaagccgtattctcgcggctgtatagtacacttccttcaaatttaagcttcttattgtgaatagaaagtcgctgcgataaggtattgagcaatgttgtcttaccactacctgaacctcccattatagccattatctggccactttccaagtcgaaagagacatcatcaagtatctttgttgccttgtccgcggaggttccagactcaagatcgcttcgatccttagtttgggatttaactgaaattgtgagaccgcgggccagaattgcaactctatcctggggagctatcctgaggatgctagagtcaagcataactgttgtgaatgattaccaagtatagccataccattaagttggccggagaaggattgcgaggagattaactggattaaataatgccgttccactatcaggaaaaaaagtattttccaggaagaaccgttcggaaaagaaaaaatatcaagcgcaattgggaacaatagaaaatgcgtctggtataaccgaccaacactaatttccacgccgatatagcccccaaagagaattgcgctttggttagggcggtttactgactaataattgtcatatatggcacacagtacatacgccgttgctcccccaatgtattctcagtagttgttgaggtggaaaatgattgtattttcaattattaagcaagagcgcaaatttcaccttcgcgcaatttctttgggtgcatgtgagcagtccctatcaaccacaagtaaaaccagcagtagcgagccctatgagtcagaactgatggtactaggtatcttggcctagaatttatacataactaatccaaagacttgttctaagagcttagcatatgactaacgaaaccgctatctgttttggtgtgcgcaattgcttatttattttttggcgaacactttgtgtggctttgtgctattaccaagtatatgacgggggctattaactttaactgtattattcgccgatctaaaagtctttacggaaataagctagttgctccatggtagcaaggatcctttgtgcattattgaaaaaaaaaaagatcattcggggcttccgttggagaacctgaagagtaaacggctctacgaatatcgctgataaggtggcagttcttcaaagtttgaaccaaacgttaatttgccgaattggcttgctgcactccttgtatgtatttgtaagcagtaatatacagatttaatcaattcagtttcctgccaaggacaactttgccaattgcaatacggcctccttggtttgggcacccccgatgaagccggcagcgtgaatgaagatacatccgtcgactccactcttttggctcaactcgtcatctctcaaacctctcaattcttcgggtaatcccaatctgaattcaaaagatgacgaagtaacagaaacggtagaaactctccatttatcactagaatcctggaacaaaacaaacttgatttgtccttctgcattattttctttttcgatagaatacaagtgttccttccatggacagaattgattcaagacaaggatttcgcctgacttgtctacatcaaatctagcatcaaaagattcttctacgatactcttggctggcaaccaacccttaccgtatccttccaaaacgctgataaaggccatgcccatcaattcagaactcttgaggaattgacggtcgaagtcagcatctgtacagctttcgttccacttcgggtttaactttgataccaaagaaggcaatgttatgttcttgtctgagaatttcttggtagcttcgatttcagtcgaatagttgttgataccattgtcgttggcatctaatgattcgatgaattctttgtaaactttttcgtacaacaagtcgatgttcttggagtccttttctggggtatattccaatacttgttgtatgatttccttcccgaaatgtttgtacactaaaccagcagaagacaatttagtattgtatttttcagagaaagtcgagttgaattctctttggtgatggtcaaagaacttcacaccatcgtacttaccgctgacatccactacaatgtcactttcttcccaatccttggggtttctggatctgatcaactcggcgtcagcgaacttgggcaataacctgagcatgtacacagcgagagattcgtccgcatggaacgagccggaatgagtgcaaattctgaacatcttgttatctaatttgatctttttgggtgctgacattatccttctacaatttcatagtgaaaaatattgttagcgcaaggtcttctcaagatgtctagatatttttctttacttgtatacaatactgaattttgtaccaatagagcgagccactttagtaagaacaaataaccaaggcatgatggacatttgtcttcaattttagaaaaatggcacttctactctttgtgtactatgtaaatagaatcactgatatacgatccaatagttctgtttttttctcattttaaattttcgtagcatgacattcctgttgatgcctttcgaacagaggataaatcaagttcaatcggatcaagtagttcatatgttgaaaagagatatatgtatttataggttaacattgatctaaactataaaataatatactcaagcataactacataactacataactacataactacataactctcacggaataggagctttgcacctaggacatttggatcttgactccatcctgaagacacatggtcaattgaacagactttctaggtggataaggaccgtcatccttgctcacaatattggggaacatttgaataagtctgacaacaacgtaagaggcttcagtcaaagcaaattgttgccctaagcaaattcttggaccaccattgaatggaaggtaggcccatcccaacttcctgttttcagcccatctttctggcttgaatacttctgcatcttcaccataaaattgcttcattctatgagtgaagtagacaccgtacgctacagttgtgtactttctgacaaacattggcgactggccgtcgggtccaccacctgttggtagaacagtgtctttggtagcaactctgaaatttactggaactgaaggatagagacgcaaggcctcattcaaaacaaacttcaaatattcacactttttcaaagactcaaatgagatttcactaacatcacctcttccgaagtcagcatagattgcagctttcaatttttcaaagattgctggatttctggccaactcatagaaggtaaacgacaaaagtcctgctgtagtatctctaccagcaatcaaaatattcaacaactgatcctgcaagacctttgggtccctagtttgtttggtcaattcgtacaagaagatgtatcctttcttcgacttttcttccaattcagaatccgaaaaagacaaggccttgttcacgaagtactgtgctaccttctgcacttttgcattgcagtctctgaattctttagggttggtcaaccagtaaagaacctgggaataggctctaacagcaagatagcgctgagacgtgttaaatgcttcagaaaaattagaaataccttcaatgtctggtctctgcataccaataacctcgtcatgcaacgacctcacactttcaccaaataaaaattccgtagctgagtccatggtgagtctgaagaacaactcctgaagatcaaatgtggtaccctttctagctttgatgtgcttggccaaggtctggatatgaggttccaacatttggacatgagaaacttgttgtctagcgaactgtggtctcaacatagctctggaatttttccaaccttcgccatccaaggtgaagatcccatctcccaacaaaggagcgaaatgagaatgtctaaatccaagagcaaaattgttaaattgggttgccaaaactgccttgtatacctctggttcacccgtaagcaaaactctgacaccaaataggttaacgtattgagtggtatcggggtactcattgaagagtctaaaaccttcatcaatcatttcacctgttttcattcttctaagtaattcaaggatgataggaatacagagaaatccaccttgtgtgaacttaataggatccttgcagccatgctttctaataatcaactgaaccgtgatgtatctgtagagggccaaaacggcgacagcagatcccaagagaacgtaccacttgctgaggtacagcaatgctataattgttttctcatacatctgagcacttccaattgaacacgaattgtacttcggtagactacaacttcattctgctccaggcaattactggggtcttatataaagtgtgtaatgttccagttgaactccgctccagagttctaaggagacatgaagcatcgttcttgcaggtacaggttctttagactaaagctagcagaaaacaatagtgagattgactatcatgtgaaaagtttctaagctaaatttactttcatccaggatatagaacgttaactgtatgaaccaagaaccgtaatagtcaccaagtctcaattagtaaggaggggaattaacgttctgtctattggcagtttcaaatcgctccatttgaaacccccaactgtacagatgtttttggatttgtgatttcatatcaggcacagttccacgtttaagaatactttgatccatcactaattgcagcagatctttctacacggtgagatatttcctttcacgtatatacgggacgagagagatgccctaatttcaactggccaaatcgagtctagatttttttccgcttcgagatatgctggccaggtcgggcgaaggtgggggagctgtgaagtttggagcattccaacagctccaatgtctatagtttatttgccgcttacaccgtctttgggcatttacgcattcctctggttcctgaaaaatgaaaatcggagtaaactagttctttgctaatctgcgaaatgtggggttgaatacacttcagagtggaagaagggctcaaaatgggctaactttcaagctcttaatctttcacatgaatgtagattgaattcgacgtaaatctatcagataaaaagcggatttgtctacggtctagaatcgaccaagatatagttggctcgtggaagataaaaatggacccccagcttttggatctacatcagttcaatagtgtcacaaaacgaccgacaatcgttgattgtcctgtgatatttgaaaggagtctgtagagaacaagacatgaatggctacgtaaatgtatccatattaggagaattatggaggcttgtgccttgacgaaggctgacctaaaacgacaagaattcatttgatttggcgaaaataaaaattatttgcagaactcgctcatcgtcccattttctaggatgaagtcggagttcttcctacatcaccatatttggtcgcgaaataccggacttagaattttgcaatcaaatgacgcgataagagtaatattttatttacgtttggtgacctacaggttatctagatagacttcatgatattcgtggatcttaatgctagtgtaaaagagtttataaaatgtaccgtggtgaaaacgtagtacgatgcaagaattgaatggaagcttacaatgccagaatgtgaaccaacttttagatttaatggtagggacagttgaatctcttgtactgatttccacactgttccatgtagaccaagctgctgctgggggtttccaatgctagcatctgcttgggatactgttgtttgtagtattggcagacggagtaatcgtcttcgatttcttcttctgagtgggaatcctttccgcgttcttcatcatcactgttgacatacgagttgcaggcgtctgtttctggaggagtgttcaactgatagttgtccttgcccgaagccgaactgctgtttctcttcttgaagtcgtggaagaaatcacacttgatgacttccttgtacaattcaggtaatgcgattctgtcgttagggttcaattggaagatcttatccaacaatctgttgaattggaatgagattggcaagattgaggtgaggatgttcttgttgttatctaacatgtagcctctgaatacctcgttgttgccgtggttttcattgaacgatgcaattggccatgggtttcttgcacaggtaatgttgatgaataaaactcccaatgaccagatatcaccggccaatgttgggaagaacttggaattggattctgtcaccgtgacgttgttgatttccacagagtgatattgtttcatgtcaactaagcctctgatgactctgttggtgttgtagttggtggttctttctggagccatgtagaaactggagcctctgcaggcattgcagcagatcaagttggagctcatggctaaaccgaagtcaatcaagacaatgtggacttcgtcgtagtcaaccaatggccaggccgactttctcttgtagcttgaattataacggatcatgatattttctggtttcaagtcgcagtggtatacaccttgctcatggcagtattcaataacttcaacgagctgcaacatgacgttcttcattaataattgcttatgatgttctggtttatgctttaaaaagatttggttgtcgataatgttgttgaacaaatcaccttgttcaaagtaatccatcaagatgacaatggctaagtcgcccaagttcaacactctatggatggttatgacgtttggatgcttgtggacctttaagtgcaatgctatttcacgaaggaatgggcaatgcactccatcctctttgatgaggtccaattcgatatcctcagcaaccacttgctggtggctggcaaagtaattgaagattttggcctggatgtactttttattttctgtcgagtccttggaggagccctgctttggtggtgggtctttcaacaccattttggctgcgtactgtttgccagtattcacatcttctactaagtagattaggccaaaggttccggcaccgattttcttgacgaaccggatgttaccgttcataacaaagttgttgagatacatgtttggatttgcttggggtctgtggaggaatggttcaggaaaactagatttgacttccgatacgggaaacacgtccaagctcatgctatatggaaaaattgcaacgctgtagtgattgcaaaatgtgagtcgctgtggagcgaaaaaatattgtatgtacttctgtcaaggtgaagtactatggtgctagtaattgtgtgtctaattgacaaatgctgattgtagttgttgttgatggtgaacgagagaagttaaactcaaacgataagggccaagggaaatatatatagttaaaaggcaagttggagccacgccaaatattggtatagcctacattatccatcacctaccaatgtgatgccaggtgatttcatagggcaagttagggacgaccacccaaaaaatacgcgatgggtccatatcggaagtttgaaagtcttccacatgactgcagccttacctcattgggagtttgacgtgctacatcaatcattcggcaccagccgatgacaaggtggaaatgttagttatccttggcggcgtgtgcaggaagctgcatctcatcgtgggcgcaattctcgatggggtgacttttttccgaaaaatcagatcatctcgggtgcgaaaaattctctcatgcgggtggaacaggaaccatgaacaattatcttccagcgttggtgaaagtgcttccagcaatactgcggctaaacgaccccgataaacactgaggtggtgcccttcttggcgaatgagttgtgatagggcccagccagtgtgcagggtcacacctgacaccatgtactatgggtgagtatcgctcttgtgacggaagtgtactgtcgacttttacgacgtaatcgcaggtgctgctgctgtcaccgtgatgtcaacatatccatttctccgatgaagttcttgtagcttatcgactattggggtaatgactcaactacagcctagtttcaaattggggtgtgttcattggtgatgatgtatttgctactgcttattctcgtgcggccgtgatgtaatgggcttctggaaacagaagtagatttcgtaatcatcagattatcgtaaaagtctacacatatttttttctatgtaacagagcaatcttgtcagcttaagctagttttaagtttattgttggagattgtggattccctcgctgctgtgctatttttgtccccgtatttcgtattctagctgcaagttgcagatgtaatgtcatattttatctactctaacaagacaacacaacttcctgtagcaggttgactgttgataatggcctcatctaactccgcttgggtgattgcggggaactcaactttaaagtattcgtccacaagagccttttgtaattgtggtaattttttgctcgttgacaagtgaacaatgcatccaccccatccagcgcctgtgactctggaaccgtaggaaccattcttaagggcaatttcacagatcttgttcaacttctcgttagaggaattgttcaacaagtccaaagacttttgcgactcgtttagaatgttaccaaaagcttcgagaaattgttgtgggttcttcgacgacttgctgaactctcccaacaacagcaaacactccaataccttcaaactctctgcgtagacatgttttgctctttggtacaatttcaaggtttcgaatctaactggaatcttggataagtacttctctttgaactcttcaacagtaattcctaactcctttgctgcttcttctacagagaatccaaccttctgttcagcattaaatatagattctctttcaacaatctccaaaagagtgtttaagtgcttgataccagtctggtagtcgtcagcgtcccatttttcttgcttcaacacttcagcaacataagagtccaagacacctcttaaagtagcagttgagacgttagaatctctgggagggttgaggttcaacttctttgccaagatgtcagaagcaatggccatttccacaactctcaaattgtagtggataggagcagtttcgtgcttgttggaaacttgcaaactgttggaaatcaaaaatgtgagttcgtcgtcttcagcgatctttgggaatccaaatggaataccaatcaacttaggtctgaaatgaattaacaatgccttggaagcttcaccatatacagaagcacattggtccataccaccagtgttgactccaacgtagtgctcactaacaacagtgattctagtcaagtctgccttactgatactatccacaccattagctttcaacacggccaaagtggatgcaacacagaaagcagctgatgaagacaagccaccaccagtagggacagtgccgtcgaaagtaatgtacaagcccttcaatggcttggatcctccagcaaccttctcgggatacttttccatgatgtacttgtgggcaacaatcaaactacaactgaagtaacttgcccacgagaaatgttccttttctatggaaacaacacttccatcttcaggaagctttatggtttccttcttgaaattggcactgtttgtattggtaataaccatttctccagagtcgttagttttcacagcagcaactacatcgacatcaatagccataggcaagaccgaaaagaaattgtagtcaatgtggtctcccatcaagttaactcttccaggcgatctggcgaagaagtcaggcttgacctcgaagttcttgacgaactcagcagtcaacttttcatacctgactttgttctcatctgggcgagagtagaaagataggtcgtggaatgtaggtactacagattcgctcatagtaatagaaacaacagaacgtaaaaaacggaagagatctaaaaagatactatgacagcttcttcgaagaaaattgtcgaataattccaaaccaaactcgagtctttatatgaaaaacctcaaggttcgaggtattggcactaattcggggtcggagataaaatatgcaacgttgcataaaaatgcagacctcatcgaatatctttcagacactaatttaccatcaactataaaaatcggtgtctgcatatcggagaaacttggaaaggtcagtttctccgattatcccccaacaattggcatactctggtcgtggaaccacctgtcacagctaatgcaattcacaggcggaatcctatatactttatccatcaacttagagtaaagctcctattcactagatttctgattaaacgaacaaaacactcctttgaagcagtcacctagtaatcttggacagcttttggcaccccaacagcgacaatactagcgttttaactgtttgaggtctcttcttttgagataacacgcttaaacagcaaacagacaaaaatgtttaacggccaaattgcctgacaataggcacaccccacagagtcgtatgcacgggtataccccaggcggttgaaaaaaagtgtaacgttacagtgttcgcggccatagtcagaggttcttgctcttcgaccttcttgcagtccgagttggagaatcttcaatatattccaacacatttatcccaaaacacacacgaaacgaaaagttttcaccttgttattctttctattcatcgtcagctttcagaacaagttcttccttgaaaagctttttctatcagattagcgtctattgaaacctgattcagaactgaaaaatttcactcccatgtctgctccgcaagattacatcctcatcactggtggtgctggttacattggatcgcacaccgtgatcgaattggtaaacaacggctacaaggttgttgtagtcgactctcttgttaactcttcctatgatgctattgcaagaatcgagtacatcgttaagcagcctgtaccattctaccaggtcgacattagagacggcgaaaaattgaacgaagtgttccaaaagcacaaaattaccggtgttatccactttgctgccttgaaggctgttggagaatctactgagattcctttggaatactacgacaacaacgttaacggtactatcagcttgttgcaggtaatgaacaagaataacgtcaagtcgatcgttttctccagttcagccactgtctacggagacgttaccaggttcggagacaattctatgattccaattccagaacattgtccaactgaccctactaacccttacggaagaaccaagttagtcattgagaacatcttgagagatgtccactcttcttcttctctggagtggaaggttgctgtgttgagatacttcaaccctattggcgctcatccttctggtttaatcggcgaagatcctttaggtatccccaacaatttattgccttacctagcacaggttgctattggcagacgtgagaagttgtctgtattcggttctgactacgcttctcatgatggaactcctatcagggactatatccatgtcgtagacttggccaagggtcacctcgctgccttgagtttcttgaacaagactaatgaaggatctttccgcgaatggaacttaggcactggtaagggttctactgtcttcgacgtctaccacgcattcagcaaggctgtaggcagagacttaccttacgaggttgtgggtagaagagctggtgatgtgctcgatttgactgccaatcctactagagccaacaaggaattggaatggaaggccgagttgaccattgaagacgcctgtaaggacttgtggaaatggaccaccggaaacccaactggcttcaagatcgaaggctacgaatggaagttgttcgaaactgaagggcatgccaacagattacacaccttcactactggagacgttaccattgcattggctaacagaggtgctcttatccaagacctcagcttccaaggtgaacacttggtttgtgcctacgacaatggcgacgactacaagcttccaaccaacccattctttggtacaaatgttggccgtgtagccaacagaatcgccaacggtgagtttaagttgaacggtcagacctacaagacgccaaagaacgagaacaacaacaccttacacggaggtcttgttggtttcgacaagaggaactggttgggtcctgttatcagcaagaaggaagatgtgttcacagtcaagtttgctctcattgacgaagacggtcacaatggcttcccaggtgacttacagaccatcatcacctacacgattgaacctactgccgtcagtcatgagtacgaagccaagttgatcaacgataaagtggatgccacaatcgtcaacttgaccaaccactcgtacttcaacctctccggtgaacctacgaccgatgacactgatgtcaccttgttttacgacaagtacatggaagtcgatgataagacgttgttgccaactggtaacctcatcaagtatccacatgctactgccaacgtgccagttcacttggaccaagacgctttcttcgactactgtttcattgtcgacgaagatggctgtggtatcgataccagaaagtcgcagttaaagcctattttcaaggctacccacccaagagccaacaccgagttcctcttctcttctactgagccatctttccagttctatactggtgacggtgttaacaccaagggcttcgtcaagagaagtggtttctgtatcgagccagccagattcgttgattccatctcttttgagaaatgggctccacaagtcatcttgaagaagggtgaaacttatggttctctcacgaagtactccttctctaagaagcaatgagtcagataaaaaactttacactaggtaggaaaaaaaaatagattttgatgaagattgactttcataaccggtcaatattacgctgagtaggaataaaatagactttcataagaagaatagttgtagtgggggctgtagaggttgtagaggttccaggaatgggtgcgaaatctgcaacttattttattttttgacaaattgacatgcactaaaatcaaacttaattaccacacagtttataaaccttcttctaactcataacaaaagtttggaggaaaccataaggctaaaagaactggctgatattacttggaacccctatcttcctaagatttattaagttttttttaccgtagtggcatacattgaacatactaacccatataaacagctataaactagagataaaggccattatcacccaatgtagcatgggccaaccaagaggaaacccaaaggatgaaaacctctgaagaaggcgtttttgaaggcgaaatctgctaatatacctaaaacgtgataaatcgcacgtgattttaagtgttcacattaaaattgccacattaacgtgataagcttcgttcctcatggcccaatggtcaaggcgtctggctacgattacgtaaccacttccggttggaaccagaagattccaggttcgactcctggtggggaagctttttttttgaatatcaaatctcgatattgtaaacttattttctgatttgaactacgctttcttgtttgaaagtatcctttcgaatatcattggcattatagtgagcacaccattctattatttggaacggacacacttaaattgataggctcaacttggtcttgataactacagtttcctgctcacttacaacttaaaattctaatctccaattcatatatttcgtgcaaatcggaatacacaatatttgtcacaatttatgaatctttccagtttacattacgaagatctccactaatctcagaaaactattcatctttgaatttctcatatctgcaaactcccttctttagtgatcctcgacttaaagcaatcataaaacacacttcatcagaatgaaagtatattccatttatatcctcaacaaggctggagggctcatctaccagaatgacgtgaacccgggcctcaccaaacttacagcaaatgactacttagtattggccggaactttacatggtgttcatgctattgcctctaaactttcaatcaatatagacgggatggaatctcaccaagaaagcacagcaaatgccaattctgcgttgctagtctctggaagatcacaagatgccaacaacaataaatctggtcttcagagtatagaaactgatctcttcaacttgtatgtcttccaaacgcttacaggaatcaaattcattatcatcacatctcccaatccagtggtacataatctacagacaattcctagtgaagaagagagaaagagtggtgattcagtcattacaattagtaagggtgaacttaaaaaactgtatgactctgctaacgaagtattcaaacagttgtatatagtttactccgactatgtgatgaaggatccgttctactcattggatatgcccataaaaagtttcctctttgacacaaaggttaaggaatttgtaacatgatacgtaggcgcttttctaatatgtggatatttgtcaattatagaaggtgccacgtctcaatcctgttatacaattatagcactctagtagtatttagctattaggtatatttcaaatagcctggtagaaatagtctataaatacgcatattgatattctagtaatctaatagatttcctaattaaattgtagattcctcataacttgttctaaaatccagttgctactctactaacaaagaactgagtccatccaccaacttgattctgggtttccaaccaagcagtttgatcttgccacacgtagtggagtacttcatgtcgttgtaattccggtcggggataaactgaactttatcattgatctgttcttttgtcaattttctatcatagagatgacaaatgagtttcaccaacgacaagttgctgatttcttcgtcgcttccaacattgtagatctcgttgatggactcatcattctgccaaatcaactcaagggcatcaaggaagtcctgaacatgcaaatatcttctcttgttagaaccgatcccatgaatagggatttttattcctttagtcaatctttcgattgtcactggcacaattttgtcaggatattggtgaggtccatagatattatttggccgtattattgtcaccagtagatcgtaagagcactgatatgagtgtattataagatcaatggaagctttggtggcggcgtaaggatttgttggaagaagtcttccttgttcatcattcaaaatgtccgagtcgccatagacttcgtcggttgagatatgcaatagtcttaccagtatctgcagattttgttgcttaagcaaacgcatacattctaataagttctgggtgacaaggatgttatttctggtgaagtagagtgggtcggaaaacgacttgtcgacgcttgactcagctgcaaaattcacgatatccgttatttggttgatcggaaaatcttctactaacaattgccgcaactcggaaaaactctcagacaaatcgagcttgataaaagtgaagttgggatatccttttagtactgaaagagaagcagtagaacattggctcgcatagttaagcttgtctatgcatgtaaagtgatagttggggtattttcgtacaaagtactcgagaaaattggaacctatgaatccagctcctccagtaactagaacatacttgtcatagaagcgagtcatgttgttgcttctagtggtctaacaaatgtatattttgacaataatgatatataagaagaaagagaactatgactaaatttcactgcaggcttcctatctgttaatctattccatatgtatatttgaaggattatttgaaatgagagaagcttgtgagatgatgaggtgataagtaaaaagtgtaacgttacagttttctaatttcctacttaccagtgctgcccccacgctttcacgtaagaaaaagcaaacaatgcactaagtagacgcccacgcagattcatgacgctttgattgagattttccgaagattgttgctggaatcgagccaatggaagccctctattgacgtcggacaaaccacatggctacgtcatgaggttgtctgacatttgcaagtttgccgattattatttggctccgacattttttatggtcgcccgcagacaaaaagggctgtatacatcccagacttcattaaaattgcaacgttacagtgaaaatttgacttaaggaccaaatcatacaaaaattcagctttactccattatcaagtaaaatcagacattttctttctagaagcttgttctacagtatataaatccctgcaaatcagtctccgaactcccggccagtcatgaatggaatgcaacatcttttgaatccactaacatccactccaacttaccaacagatgacgaacgaattcgattttacaaaccactcccatcgtcgcttcaatccgttgagcaacacatatgtcttatgctcaccacatagagctaagagaccatggcaaggtgctcgagaagagattaagaaggttgcgttgcccaactacgatcccaagtgctacttatgtcctggaaatgtcagagccactggagacgtcaatcctaaattcgaagccacatttgttttccctaacgactatccagctgtgaagttggaccaaccaaactacgtggaagaagagtccaaggattctttgaagggaaagttgttgaagacccaaggtgtcaaagggaagtgttttgttatttgcttcagccccaaccatagtctcactttaccagtgatgtcgataccagagatcaccaatgtggtcgaagcttggacactgttgtacaacagtttgcaacgtgaagctctttcaggaaatgctccctacaaatatttacagatcttcgagaacaaaggctttgctatgggctgctccaacccacatccacacggccaggcctggtgtttggacgtggtacctacggaagtcgacaacgaattacagaacatgcaaaagtaccaccaggagaaccttactcatatgttgggtgattacgtaaagctcgagttacaagagaaggaaaggatagtagtggaaaatgactcctttatcgtggtcgttccatactgggctctctggccatttgaaactttgttgatagctaaagaacacctcagatccacgcaagattttactgagaagcacaaacaagaccttgccgaagtgcttaaggtcttgactacaaagtacgacaacttgtttaatacctcttttccctactctatgggtatccaccaagccccattgcaatgttctgaacacgagaaggatgcttcctggttccacatgcatttctaccctcccttgttgagatcagctactgtcaagaagttctgtgttggctttgagatgttgggtgaaccccagagagatttgaccagtgaacaggctgctgcacgtctccaggaattgagcggggattttcacttcagccgtaactaagcacaggaaacattaaaatgtacatccaagtcaaaaatatatagacactggtttacaatcatagatattgcattatcagatgattacttactgctaatagccgctatcgggccatttctaacctttgacgttgcggaaccattctcaggccacactatagacttatatacgcaaattgactaatatgaaccatcagaagctttcacgtagccaaaaaagagtatctgcctacgttttcaggattttgcattgctttggagtagctgaaaaattttggaaccatcctgcagctagtcgattttttatatatcaaaaaagaaatctctaatgatatattgcattttctgacatcgattctaacagtaacctcgaaaaacttactaagcgggtagaaatgacagtagtaacacctgtggagtcagacagtgaaaatttggccttctctgagttgaaaatcgaagacctgaagctgcaaatccaggctgaggctccagaaaaagaatccaaaccacctttagagtctagaataggcaaggattctcccttcaccttcggacaaagatacttgaaaagtgacgaggatgttttcaaccataatgcatgggaccatgtggaatggggtgaagaacagatcgaagaggccaagtctatgatagctaaacagtacgatcatcctgtaaaggactttgacaagaagctctacaattccaacccagccaagtattgggacattttctacagacataacagagagaactttttcaaagacagaaagtggcttcaaatcgagttcccatctttgtatcaggttacggctgaagactaccaggaaaaatgtacaattttggaaatcggatgcggtgctggaaatacattttttccagtattgagtcagaacaagaacgaaaacttgaagattgtgggctgtgactattcgaaagtggccgtagatttggttcgctctaatgaacagtttgctcctaaccatgagaagggtgtagcattctcgtcagtttgggatttggctaatcctgaaggacagcttcctgaagatgtagaagaaaactcggtggacatagtcattatggtttttgtgtttctggcgctttcacctgaccaatggaagcaggctgtctccaacttggccaagattttgaagcccggtggagagattctcttcagagactatggcagatacgacttggcccaagtcagattcaagaagggaagactcttggacgataacttctatattagaggagatggtactagagtgtatttctttacggaagaggagttgagacagatattttgcatagacggtcctttcaccgaagagagaattgccaccgacagaagattgttggtgaatagaaagaaacagttgaagatgtaccgtaactggttgcaggctgtgttcagaggataacggtaattgtaaattagagctaaggaaattagaattattgtaaactagaactattagaatgaacttttagaaaatagaaccatagtaatatcatcatgcattgtagtaaaacaatagtaattaggacgatcggtacagttggatgtatgttacactcttgggatgaccacaacatagaggaaattgtctaaatgcttgaagatctcccaagtttttaacaaaggctcatcaagcaacgactgggtatctatcccatgtatgtaaggtaaagcgattgcttctctttcagcaaaaagatgtggtagatgtagcagtaacacatctctcatagaagttggctcttcctctccatacggatagataggtgcctggactatggttgtagttccaggaatgaatattcttaccgggatcttctgtgccttatcttttggtacaattttcttgtttatagaggtgtatgccagcaagttgtgatccacaatggacacccatagctggatggagttggcttcgctgaggctcatgataggtttagaattgccattaagtacgaaacaggactgtttaagttggttgactatcacttccttcaatgacctgtcgaaatcaacagttccatcgtctttcttatagataaaggggatgatgtaatcacttggataatcgtcgtatctcaagtagactgtccaagagctgctagactcaaagttaccgagaagtgaaggaagatgcaaatagtcataaagcaaccctacgggaagattccattttatgggtactccttcgtattcaaaccaaagctgttttgacagaagtccctgtacaaatgccagaaagtactctacaatagctggcaactttagcgttatgtacgaatttcgataaatagtacacaagtactcgactttctggtctttgtaggccaaaacaacacggaggttgatatggccgttccagagctttgccttgatctcaattatatctgaatcagccattatcaatcattgaagaagctctctttctacgagtatgagaattgaatgtcaattcattcactaggaatgtgtgcaatttctggacagaatcacaatccaaatgatatgactactgtctctcacagctttgatccagagccaatgcctgaaatcaattgatttttcaatttcacaaaactgcttcttctggtaatcacagaaccctttcggaacaattacgattgtttattgttgtactggaaggtgagttaaattcgaattgcacttcttaatccattcgccaatcacaaagaatcgtgtaagtttaatctaattctgtaccattatatttagcattcctccatacagtctctcagattcagtggtgaaatcaccagcaactctaccagttaaagggactataattgtggcaataatccacatataattatcattcgtaaatgtttgaactaaaattgctgaatatctccctgaaagttatcttgtttatcctttctgtcatttaaacttgttgttcttatccgagatccagaatttcccactactatctcactgaaaaccactcggtgatcgctattcaaaatcgaaaaacacaatgagcccaccttcccttacgtttttcaggtcaatatggggatgaccaaaaacattctctgcatttcgttatctaagactgtcctttttatttttagatgcttccgtactctattgtgactctcttgtgctggtacaaaaaatgatccaaatagggaaattgcagccagcctcaaaataatggatgcgaaagccagccatcgccacaatatttttgaaactttcgcttgcagtggaaggcaagatccttccatggaatctattggcggcattatatatagaaagcaacattccaactcagctcgtacaacacattgtaatttgtaatttgacgattaattactatagaccgcaataaaccagcttttcaccaaagttacttcgatttcctctgcataaccattctattttgacacaattcatagaagtcataatgaagaagtccgatacaaaacagttgttgagccctcttgacgagcccaataatataccagcagctggggacttcgacttttcccatgctgtgtcgtcttttaaacccggaaactatgaaatagacgacttgcctaagagaattcctattttcaaccccaaaactggaaagatccaaagatttgtccgtaacagaagagaaattcctgcaagaagagctgtaagtatgcccgttccttctacatcgtcttctggatcatttccatctgcattctccaaagaacttccatcaccaccaatttcagaagctgacaatgagagtggatcttcttctgccaactctctgctctctgaatatagggttatttctatgtacacacatccaacttcttccatagataaatatcatgagtcgttacctccattacatccattgcccccgttgccttcttcgcaagatagtgaagatgtttcttcagaatctagtctgatctactctgatcacaaaacaacttacagcatgaaaatatcttctccctttaaagcaaagaatgttatcacagacgatgacgaaagtttgttctctgagctttctcattcttctagaacggatacttcttcggacttgagtgaacattccgattctcccagcttgattgccagaagtattatgtatgtggttcatgaatactcgtctgctacaaactcagaagtgtcattggccaccactggacagaatatacctgtggacgattactactggatggatgaccttcctgacagtctattctccaacaatgctgtcgaagaagaacctagagagaaaatgatcactccttcgaacaccaagaaactattggaaccaatcaagatagctgcaacaccaatgcctcacaagaataaacccttgccattgccattgccgatgcagaagtcaaggaaaggaatggaccgtcgagttcagaacaattcaaaagaatgcagtagtagctttatatctctgaagagtggagaatcttcttttacggaagcaaaacatggattggcagcgtatgtgaggcaaaacccattcaattacagtttggatggtccaaagcaatacaaactttccagatttccttctactgcagtgcccaaaaagaagagagtacaatcggcatactctactagcacacaaaagtctacagaaatgaccccatcctctaaaccaagaaccgtctcaatgtactctgttccatatccaacatcaaagaacccgataccaccagtggtttcttctaagcaagttgttactcccaaaggagtgtcaggaacatcattccagaaacccaggaaaatatcagaaggcaagactaggaactcagctttacccagtcttccagtatacccaacttccagagaaggagagaaagaagaaatgatcaagaaccatgtcctgtcattcttactcaagatgaagcagatgaagaaagaacaggggggtggagctgttaaacgacagggcagagctccttcctcttctagtaagaatcttccccaagtgcccgaaatagaaagggataaccgtttcagaagaaatgcccagggcatgaggtggtagtattcatagcatgtatatgattataattacgtcatgtgtggtagtacctgtgtcaaaactatctgtatcattatattaatatatttattaaacgttagctattgcttcttcaacttatagcttcactattaagtcattatccttgtattttgcaatcaagtcttggatgtcgtatttggcagcgatctttccgttaatgaaccgtccaccaagatagtgaatcttgtcagaaccataggacacaaacttcttagcacatggttttggagctgtgagactcaccaacattgtagccttgatatcaagatctattggaccttcgtctacgtcccaacctgatggaatatctacagaaactatgggagatatctttccgtgattttctgaaagaaaggatattaagtctttgaagggttctcttacgggaggcttgaacgagaatccaaacaacgagtctatgattaggcccgttgattcttccaaagccaattgtttgacttcatccaaagtctcgacttctcctacatctaagtcttgcaattgagttaccaaattagcataaagaggattttttgtcctttttggatagtacaagacggggtcgtatcctccccagagctttaaatggcgagcagccaccaagccatcgcctccgttgtttcccggaccaacaagaaccaatacacgcgatacctttgaagctgtgggaggtggatattgtttatatatggcttgggctactgaaagtcctgccaattccatgagttgatcgatagaaaaggctccagtcgacatcaattcctggtcgagttgagctgcagctttggctgaaagagttttaaaagaggaacgaagcattctggaatacaaatgagatatttgcaatgaaatggatagaagtaaggcgacgcagggcactattataagtaaaacttcccttttgaaataatgtttactgaaaagattgatcttgataggatatattaattcggtgcgagagtaaaaattctcaatggtgctgggatgatctttttcgacgcaatggatcaacttcacctcaaagagatgcagctatcaaatgattgtatgatggattcctttccaatgactaaggggagtggaatggagtggattctggttgatgagaatctacctgaaaaaataagtggtgcgatccgaaatccggggaagaggtagtgaactaccagccaaagaaaaagtagcaagattagcgtctcatctgctcgatttcagggggatgagatcagatcaccataaaggatctgcgaaccgataatgtactaggtccattgtttgataagagacatgtgctttgagcaatgctagatttatgtgagcagcagaatgtcacttggagaggatctcactaatgcgcattagctctcgctatctctcgctattttaagcagacctcctgttcgcaattctcagtaactgtatactggaccacggtttacgcgctataataagcaagtcctctcggtactactgcatgtctcgttcgctattctcgctattctcgctattctcgctatcttgaatcctcaccgcgtgtccctgtaccgctaactgtacactctcattattctcatctgacacctgtcataaacgcagggtacattctctcaccgaaccgggccaacagcctctgcctctgcctaacaaccataactttgccctcagtcgcctttggtagccatcacaatgcagatatcaacacacctggccgccccagtctgcagcccctatccgcccagccagtgcccgaatctcatcttcagactcaagttgcggtgatggcttatgtcagccgcctcgccaggccgtcctgcagagttcctccttgggccaataacagaaatatcacaacagcaaagaacatggtgtcttgtggaagcgttggcaggtgttcatatcagtgtcgaagtccagctgttagagcttaagctatttcaattgagagaggactacggtgtgtcactattacgggcaattggaattaaacacggttgcgaaattgcgcgttgcgactgagacaatcaaaaaatttcagtaccagaatcccagagcgaataaattaaagtaccaccacggacgtgaagaagatactgaatcctcagaaaggcgaatagtcatataaataccactcaattgtatctctacagtgatctatactactgtcgctttgcccaccagtccatagagagaagagaaatacagatatacacgctaactgtgtcagtgtcgtattggtagttctcaccaaaatccattttctctcactaaattttctcttttcgcttgtgagaccttttgtttactgttgtgaattcgtcttgccatattttgaattttggattctgaatattgaaattggatttgagtattgactttaaactgaattttcatttttctttactgattccgttttcaactattttttttttgcttcgtgttctcaaccacctcgttccacatcaacaacatataacgctatgaatctgctgtactacgagtctccctctatggtagccaactcgcccatgatcaactacagaaaagacgccaaaaaaggaatcaagttcaccttcatggtggtaggcgagctgggcacggggaaaacgacctttatcaactcgttgttgaacaagaaagtcgtatctcatcgttacgagaaaaacggcaaggccaccaccgacaccaagacgttggctttcacttcggccaaagctgtcgcacttccaaacacgtctattttgacgagagacgagttcaatcctgagaccatccatgaagagccgggcattgccttgactgaaaccaaagttgagatggttgacgatgacaacatgaaattgttgttgaacatcatcgacacgccgggcttcggtgacaacttgaacaacgagttgtgttttgttgaaattgaaaactacttgaagcaacagtttgacttggttttggccgaggaaacgagaatcagaagaaacccccgttttatcgacaccagagttcacgccttgttgtactttattactcctactgggcatggcttgcgtgaaattgatatccagtgcatgaagcgcttgtcgaagtacgtcaacatcttgccggtaattgccagagcagactcgttcacagccaaggaattggaccacttcaaggaacagatccggatcgacatcgagaagttcaacgttcccgtgtttcagttcgataactacttgaacgagtacgacgaagacgaagactacgagttgatacaggagtgtaagtttctcgctggtttacagccatttgccataatatcggctgagactgagtatgagatcaaagatcccaaaactggggaagtcagacggactaaagccagacagtatccatggggtttggtggatatcagcgatcccaagatcagtgatttctcggtgttgaaatcggtcttattaggctctcatttgcaagacttgaaggacttgacacacgatttcttgtatgagacgtacagaactgagcgtttgaccaaggtcactggatccaagacatttgaaactgacgaagacgaaaatgagttccatgacacggtagaatctattcctgaacatcataaccagttttctgccaacagcaataccatcccatcgctttcgaatttggcccaactcaccaatatctctgcattgaacaatagcgtaaatggggacacgacttccaccacatcttctatccgtaagagcaagtctatgttgctcgatgaagatggagaagaaatcatcgatactccaaggttcaaggacacagcatctttcacctcttccacatcgacagtttcgatggatctctctgccagaccacctgacagtcctcagtcatccagaacaaacaactctttcaagaggaagtctattggcccacaacgtagtcagttacgtcaaatatcggaaactgttccttatgtaatcaggcacgaacggatcttagaaaggcagcagaaacttgaggagatggagatggctagtgctaaagagttggctcacagagctgctttgttggaacagaaggccgccgacttgaaggccaaagaaaagacgttgatgaagagattggagcaggaaaggttgcggaagcagcagtcgatcctgcaaatccaagaggacgttgcagaccgtgaagaaggtgaaaatgtgacgaagtttgagggtttacccaccgaggaagaggcccatagggagattgcgcataactctacgcttaacaaggacgagacgattacagatttgcactcgatagtgagtcaatcttgaggagaagacagtgtatcgattgatttaaatagtaccattacatggaaagataagagagcagtagagtatgtagtataagatgggttaagagaattactagagaatgctatagagagagtaccgtggtgacatagatgtagttcaaaactagtagtgtgagacataggagcacatgatattatagtgattagtgttgttcctagaagagtatattatggttcaactagaagagaagagaaagtgtatttgaagttttgtaatagaatttgttgcatgttcaaaagtagaatagcaaaatatgatgaagaatagtgaagtgtagcagtagaatggaccgtaaagtacaccctttagagtggacggcaccataatcatggaattgttatagtttctgtgtagaggatagaagcaggctcgagtagtggagaatagctggggcagaagtagtagtatatatgggacttctcagtaattctgggcatacaacagaatcccagctatctttcgtgactcaatcagatatcattattgtgtgcaaaatgcgtcaagatcccgtcacctctatggcctctaataaggctgtgttgaaagccttcgcaacagtggagtccgctgggagttgtgttatcccaaatgcgtgatgcggcaaggctgtgaggagcgcgacttcagtgtgaaatttggaattgatccggtgacgattagcgagaaaagcgagatacctcactacgactggggaaggcgtctccctaggagaaaatcttcactagcataatgacgtcaggtaagctacaacgacgaggtagccaactctgtaattagagattggccaattcgctcgtcgacccatttattgtcctaattgattgaaggagagaatctacaatttctttaaatcttctttctatcttattctgctcactaattcttttctcgtatctctggtcgtatcacctgcccagtctcttcacgtccattccttgttctcgctaattccatctgcgcacagaaaaattctcttcaagaaagttcagcaaaaatccacgacaacagaaaaaaaacaccaaatacaaatcctcagcttgtgaagacaaacatactcttcttcttctagttctactatcgttgttcaaacttgtggtttatctcgctagacatactatacggcactgtcacagaacagaaccgcgtcgtgtcttagtctgcttcgtctcttcatacatatttggctgggactttcaagaactgttgtgtgatcgaacttgatttagaatcaatctattcattgtcgttttgtacacctattgattggtcttattgattctttgtaggccacgatagcttcttttatttgatttaactactaatattgaattgattttgttcttgaattgagcctattggtataaatattgtcgtctaccatttcacactattgagtatcattatcacaaaagattacattcttcaacttcatatcaactccttaatcttcaactcatagtcaacttcatctttgcaacttcatttaagtaaatttcataaagttaaccttacttttattaatttgccctaacttcaactactttccttctttcacgtacaatatcattatacatatttcactatggatatcatcaaagtgttagaaaccgcgttgttggaccgcgaccccaacaagagaactgaagctgaattgcagttgaaccaagctgcaaaccaccacttcggcgaatacgttacattgttgatcaacgccatgtccaacactgaggccaaaacagagcccagaatgttggcaggaatcgcgttgaaaaacctgttgaccgccaaagaccacaaaacaaagttaagctttcacgctcgttggatcgaattggacttccagaccaagtcatccgtaaaaactgttgctttggaaactctcaagactgctgatgatagagtcgccagctcggctgcccagttggtagcagccattgcagatatcgagttgccccgtaacgaatggcccgagttgattacgatcattatggaaaacaccaaacctgaaaacccagaacatgtcaaaaaagcatctctcttggctattggctatatctgtgaaagtgccgatccaaacaatccagctatcatatctcaggccagtggcatcttgattgctatcgtacaaggatgtcagagcagtgagccttcgaatgtcgtcagattgactgcgttgaatgctttggtcaactcgttggagttcatcaaattcaactttgaaaaggagggggaaagaaactacatcatgcaagtagtttgtgaagccactcaagctgatgatagtgatcttcaagccagtgcctttggttgtctcgctaagatcatgtccctctactacaggcacatgtcactctatatggaaaaggcattgtatggcttgactgtctcaggcatgcaaagctcggatgaaaaagttgcttgtatggctgtagaattctggtccacagtctgtgaagaagagttggaaatttctcttcagagacaagaattgggcttggatgctgttgaggtgcctgattcagctgatttgatcacttataactttgcattggttgctatccaagatgtcttgcctactttgttgactttgcttacaaggcagaacgaagaccctgaagatgacgactggtctgtagccatggccgctggtgcttgtttgcagttgttctcacagaatattggaaactacattgtggaaccaactcttcaatttgttggtgccaatatcagtagccaagattggagagctaaagaagctgctgttatggcttttggctctatcttggatgggccagatcacgaccagttgaagagcatcatcgaccaagccttgcctccaattcttgctttgattggagacgagtcattgcaagtaaaggaaactgtagcctggtgtttgggtagaatagccgacttgattgtagacgcgattgaactctccaagttgcagaacttactagaagctttggtaataggtttgaaagaccatccaatggtgtctaccaactgttgttggaccttgatgaacttgttggaacaattgtgtgctgatgctccgtacaacgaatccagcgtgatgtccaattactatcctactatcatcggcattttacttgagttgtctaacaaggaagataacgacttcagttcaagagcttcttcttatgaggccctttctacgttcgtgacttatagcgccattgacacgatgcctgttgttcaaggcattgcaacagaagtattgtccagattggacaagacgatccagttgcagtcgcaggtggccaacagtgaggacaagggtaatttggaggaattgcagatcaatattttgtcattgttgactaacattatcagaagaattggctccgatattgccgctgacgccgacagtttggttactttgtttttgaagttgttggaagcccaagctccaaactctttgattgaagaagatatcttcattgccatctcttctgttgccggtgccattggtcagggttttatcaagtatatggatgtgttcttcccatacctagtcaaggctttagaaaatacggaatcgcctacttgttctactgcaattggtcttgtagctgatttgtcacaatctttgggtttgcaaatcctaccatacttggaaaagttgatgaacatcttcttaatcatcttgaacgacggtgaagtgaagcgcgaattgaggccagccatcatttcatgttttggtgatatcgcaacttccattggtgattctttccagttgtatcttgagtttgtcatgggtatttgtagccaggcatcacaagtgaaagttgacgactcttctatggaatcgattgactacgctttgaatgtgaaagaatcagtattggactgctacgttggtgttgttggtggtatggccgagcaacctcaagtaatttatccttactttggagctatcttccagttcattgagggagtcgctatggacatcaacatgtcttctactgattctattgccagattagcaaccggattgttgggagaccttgctgctatgtatcctaacggtgatttcaagcaagcataccaacaagaatgggtcacggagttcatcaagaaaaccagatccaacccagtctttgaagaaaagaccaaggacgctgctagatgggccagagatcaacaaaagagacagttggcaggcttttaagttgacagttgaagcctactggttgacatcttcgcttcaagttcatgcagccatctttggccctcattatttatcacaatcttcatcatctctcatctctcatctctcatctctcatctctcatactttcatgtctcatcatttctctgttctctcatctctaatctcatatttgatggtctcttgccagctcgtcatttctcgtcatctctagttcctctcatatctcttattcatctgttataaattctatttgtctacttcgtttgattttcgtttagttttgctttccctcgtcatctcttatacatactctatatacgtttacttcacaaaactctctaaccatggattcaatccatcgttattggatttgttatttatcacgtctctcatgtcctctaatgcctcctcatatagccactaattctaatattgcaattaatatacgtattcaagcaaattcaataggttgtagttttctgtcatggtggtaacttcgaattagaaataattgatagttgaataataagtaatcctatttgggatattctgcgacctttttttgcatccactatcttataaaaattggatctaattattactgaaatggaatattctattagacttcaattgaaatctatagccaaaagctctgaaatgaattggtcagcattcagaatcatgaaatatatactacttttgaattttttggcttgaaataggtctgctcttcaataccgtgcttgattcctaaatttttctttggctggaaaattcgcgactgaaaaaatggaacaaaatcatgttatctcgaatactattttgaaagatggattgacttatctcctttgctagtggcttcgttgacattctttctggaatcctagcgcgtgtcctttgttccagttggtttcctatttgttttgctgtaagcaacattgtttagtgccatccttcggttagtctagccgaatcaaaggaaattgggtgcaatctacgtattcaagttcaacataaaattcatatttcaattttttccactcgatctccgttccaggggcatcctatcttcatctgccgattctgactttgttatttctgtaaatagaggtataaaaaaagttcgtctattgcattagattttttccattgggctaatcatttgctgtactattcaacatgtccgcttttccatcagattacaatccgattccgtttgatcatacatacgtcttgtatgaccctaacgacataatatccatattgtcggttcacttgtcgttgcttcccatctacgtgatggtgttctatacctcgtggtttctcataacaagagagatagaacctgtagttgtggtaggcggccatttggtaggtgaagtcttgaataagatcgtcaagagaattattaaacagcccagaccagattttcacaaggaatttggtagtggctcctttagcttgggatatggtatgccctcggctcattcacagtttatgggctactttgctgcgtacttcatttgcatagtcctttttaaggtcaagcatttgaggagataccagcgtttcctaggctgtgcctttcttgtagttgcatctatcttagttgcttcttctagagtgtatttgttgtatcacaccgtccagcaggtagttgtaggtgttatgcttggtgcattgttggggttggtttacttcatagctaccacctttgctagagatataggactagttgattgggtgttgctgtggcccatagttaactacttctacattaaagattcgtattttcactgctaccaaacgttcagggatgaatacgatacgttcttgcggagcaagtcgaaaggctctatcaagaaggtgtaatactgatcatgacaagtttctatacatgtcaatcgtgctctgattcagtgcaagctattgattactagcaaagtaataaaaagttatatatatatatgtgtgtgtgtatacaaatgataaatggtacatagttctatacaaaagatagatataaattctctattcatctcactatgatgtattcattaaaagctatcgaagaattaaaaatatgaattaatacaacagtacatgcattatatatacaaacgacagatcaaagtctagaagtcatcccacttgtcgtcatcttcgtgtttgctagcagcacctccgaatttggatccaccactaacactgcccaatgaagtcttttcctgaggtttggagaatccaaatgcggcaggaaccttttcttcctgttggttaattgacaagttgttgaagagcttgccgaacttgtcttctacagttttgtttaagcctctttcgttgacctcagtggtgaatgtttgaaacgtctcggacccgtatttgcctgtttcttgcatcttctggccgaattgagccatggctcttttggcttcgtttgtgatatcagattcttgcaattgcgagatacctggcttaatgacagtttcggtcacttcgttgacagacttcgccacagtggacgaaaacaagccccaacccttagaaaaagttccaagaggatcggcttgcaagttgtcaagagtaaagcctgcgagagaacctccagcagcaggcttgggagcaggagtatttccaaaaccgccatactttccaccctgagaaggaggtaagtggtctggtctcagatcgtttttggagcccaattgtgcgaaatacgcttcattcttctgcttctgttccccttgcaaaacaggggtgtttctactggaactgatctgttcctgagctatgctggcagaagagttgttacttgtggaaaggttgtccaaagtgggcaaagtcttgccggaatggtctttggctacgaactccctgccttcaatttcacaggtcaacaactccttgtagtcttctgctacgtagttgtcgtacttagccttagctggtaaagtcaagtcgacaccgttagcagtgaagtaggtcttgatcttttcgttcccgcccttttccattctcaacgtctcttcaggcttgaactggtccatagtaatggatctgacaaacgaaatgtgcacacccaagcctctgtggataccagcacattccaaacagatgaagataccaaacttgggagaggcccattgcgggttaggagcaccgcagtcggcacacttcttgttgtcgccgttcttctgaagaagcaacaactttctacgtgtttctgggtcaatagacattctgtgattgttgtgaagtcaaaagataatgaatcctcagtgagatctgaatttcgatgagaaatttctgatgagaaaaaatgtttagctcgcaaatgtttcgaaaaatgtaggagattgtatcgaatgcaaagttgtggaagaaggagacagcctgctttccgcgttctagagaagactcgtagtaattcttgtctatgaatcggcgtagtttcaactaaggtttcagatccagaaattctaaaaagaacacaccctcattaacaaagaacaggaacggcggaactgattgattggaaattgtgagcacgcgtttttcacacgaccacacactgatctacgcgaggccccagccaccttcagataacatggtaggtagatgctgataaaccatatacatacaaatggaggctatttttgaaaaactgggttagacattacttgtggtattctgtttggttgcgaaagaaaaatggttatggaagaaacttttgtaaattatgctacagtgttgcaatttcttatcttttttttaacttctttcgcagcaattctgaaatatttgaaagaagtcttgcattcgttttcacatatataatttctctagaatgatacagaaaagtaccgttcgttcttgacaaaacagtagtgtactcaaaaagacatggtctgagttgcccgactatattttctacatcttatttccaaactcgttcaataaatatagttatgtgcagctatcctacaacttagagcctggatcctcattctgatgcttaatggtaactgggtagagatcgcctacaccagaacctgtctgccatgaagcaccatcgacaacggctacggtaccgttgataaaagaagcagctggcgaaaacaagtagacagtagcttcagcaatgtctctagtggttcctagtctttgcaaaggaacttggctgatggtctttgctctgtccttaaccaatctctcgagaccttctgtgccttcaattggaccaggagcaatgacgttgcttctaatacccaaaggtcccaattccactgccaatgcattagaaagagcatcaacaccagccttagcggcacctacgtggatctggaatggcacaccgtagtagtgcaaggtagcactgacaaagatgatggcacccttgttcttcctcaattctgggaaggttgccttgatggtgttgtaagagcccaacaaatcaatagctatcacagacttgaaggcattggaagataaatggttgaagtcgcacaagaagttaccagcagctcctgcgataacatagtcgattctgcccaactctctcacggtcttcgcagcagcctcaacaagctgactgacttctctgacatctacgatacacgatatgaccttggcatctggtctcaattgactgagttcagcggctgccttgtcggtcttttccttgtttctaccaattatagcagcattggctcccaacaagatcaatgcttcggcttgaacacgacagatggtacctgcaccgccagtgacaaacactaccttacccttgaaaatgtctggtttccagaccgagttggtgacaaacgactgatctaaagtactaggcatttttcacttataaaattgattagatggaacagaatagcaagctttgagcgaacaatgatggctaaactgtcaaaaattccgttaaagtcaactcgatagtcgatatcaaataaataccaattatcaacgagttcaacagctgatattgcccagtactaggccaatttagcgaattgatgggaatcgtggagttaaataccaaaagaatatccgctgacaagtgtaaaccgtcgtgtgcataccagcagattcccttgccccacaagtttctttaggtattatccgaggaacagtttgatatctggggaaatgcgagtgaaaaaatgtggatgtaccgaacggtgataccgagactttgactgtgcaaattatgacggatcaattaacggaaattggctttgaggaaataaattgtaactgaaaaatttccgaggaagttcttcttcaaagctcttatcgatctcgtaactcttttcatttacgcagatggttgctcgcgtaacccttgtagacttttcacattctcgttcttgttaagattctactcttgtaaatatcatcatcagctttagcattagtattagctaacttttctttctatatgtcatatctatcaaacaacattattcctttctgaaccactcaatgtcaaagcgatcttcttgctagtatttgcaatattggaaactacgtttggcgataacttcacgtcacctgcgccattcacaccaccggacgtatcggattcatccggactcttgtcggatataccattcttagtcaagtaaactcggtgacaatcttctggatcatcgtcgtcttctctaggtctcttctccgcattgatcaaagacttaagctcaggcccagaaaagagatcatttactctattttcattgcttgattcaatatctttgctagcagcaattgaatcgacagtgtttccagagtttattgcatttgaatttgtttcttgatcttcttctatcgtatcatcctcatcatttaaaggagtcgaaacattgtgacggtccaagatttcgtcatcggaaccaaagctgagatcgtcgttcttgatcgtattttctgtagcactgttgttgtggctgtggtcttcgtagaatccattctcaactagttctattagttcccttcccgtattgacatggttgattttcgtgccacagaattccttgaaatctctgtagatgtagttggctagtagtttgaaattgtagcgtttgatggtgacagtggaatcgcaatttttgacaatggtctcaataaaatcaagacaggtcgaattggccatgttgttctgttcggcgatcagttcaaagtagtcaaagaaatacctcaacatgttagagtcaataatgtaccgagtatagtagttatcgttgagtaaggtgatattttttaaacaccgtatagcactcaacttcaacgtcgtcttgcagctaatggctattagcttccctacacccaagagtatatcctgctcaaggaaaaacggtctagaaatgctaacgtcatgttccttagtacagaaggaaataagatcacataagtggtggtataataactcgtcgccggtgatagcggctacgacaggattgctggaagtgaagtcttccgtggatgcaagaattatgagacgcttgtacaattcaggcgccacttgtgaatagaatgctttgaagtaattgttagtgttgatgtcatgaaagtcgtcacctgagttgccattagagctatggctgcgaagctcgttcttgagctggtcaatctcgatatcaggactcgagtttgaagctatgttggaatctaaaaggattcgcaaggcttcaaacgcctgaatctttaatcctggatttttgtcctctaccaaaagtctggtcaaaatcgatatcaatgtcatatcgtcagaaagctttagcttcaagctctttgtttcctcttcattttccgtaggctccattctgtggttgtttggaggctcagagttgtctatggtttcgtcgttgtcgatggaattcacgatggaagtgtcttgttctattataatcacgatcaattcagtacccaatacccgtatggaagtatctgaatcgtttaatgcaaaacttgtcattctgaagagtccactcttgaccaaaagactaaagaactccagtttctggtatgactggagcgacttggctatcaacacatactggtgcaacatccttactccatctctctttctcgcgagattctcattgtgatgcgattgcgattccttctctgccagcttggccctgggatactttatcatctcgtagtcttcgtagatgttaaagagctgctcaagtatgagcggatccttcaagtagttgataatctccacttgattcatgtagataagagtcgatatcaaattgaaggtctggtcgtctaagaagcgtgcgagtactacatccttcaagaagttgagatgaaagtccttcttgaagatattaaggtcttctacggggattacggtcttgaacgacttgttatccaaggagtctctatggcatgccttgaagttagggtattctgggtcgtactctaggatgcctgctagtgcaagaatgttttcttctgtcagtagaaattcttctatcaacgacgactcgttgtagagtatcaaagtcttgatgatttcgctgagagtgtagaggttgatgaggttcctgtcgttttcagcagcattgaaagaatccacgagtttatggaaatagtcgttatccaatatatatttcagaatgcttgtacgtgtgaactgcgagttggaaccctggttgatgatttctaggatcgactctaaatttgtattgctaggcacctctggatatgtaatgggacctgtgatgagttcggtgatatcgtcaccctcagttatgttaggaatcacgtagtacaaggagatattaggagacaagctttcctgctggactttgatgatgaattcacagagatccgcacatccctcggtttccttgaacgaaagcgctagatctttgcccgagagatctgtccatactataagcgtttcctgttgtctctggtactgtatgctaccttcaagaaacagctttagtatcacgtcctctgagtctaactcgtttctcacgaggaaataaggggcgccgttgtcgatttcaccaacgcagtagcctgttccattgtcgagccagtcttcaccttgaagcaagtatactttgactcttcgcggtgtggatcccggaggattcacgggatctgtatccattgtaaatataatgcaagcagtatagattgatgtggtatgaagcgtatctatgtattgcttctgtttatacggatttggttatggttacggcaaccgtatggaatggataatggtatggatatatgaatatgttttatgatagtttctgtctggtgctcactttgaattgaatatttgtgctacttctctacggtttgaacgagaatgagactttgtagaataggtgtatgagctgtgaggcttcacgagaagaaatctctaacgggatggaagtgaaaaggacggatatggagaatagatgaatatactgagactgtgccaataattaatccacagataatggaattaatatgtcgcactgttctgtataggaataagtctcagggcaaaaatattctaacagctatcggtaaaacgcgtcctgtccgcgatcgcttgacatatcggggcgatcagaatgctaagcctaagatgggaagacaggatgacggcgaatttgaagatctaacgaagagtgggaaggagacagcagagagtgttgatttggttgttgtaggtagggctgaaatttgaagattcttttgtggtgaatattcagtttgaagtcgagcagtgcgacattgaattcatcctacttagacgggctcatagtcagggtgtagaccaatagaagtgtagacatgaagatatatagatctctgaagggagaaaacagacgtgaattcatttttgtatactgaaacacacagacttatatgaaacgctggtataaattgtatagataagccattggggctgtaggttgatatggacttttgtagatttatgtagatatttatgtagatacaagaatatatggatacaaacgggcatcaactgcagcagtgactagtaaacacttataaggtactaaatacattttcataactggtctttgtatgcttattgcaatctatttaagtaagctctattctatttacaagctaatggcacaacaaggctgcactggtcaagtttctcaaccagtcgaccttgtcgacatcgtgggtgtcttcgacttcaccccattcgcgggtctggaagatggtctccatgttgcccaactcgacgatttcctctacagtcttgtggtagtagtcgcccacatagtctctgttgagctggtagacttccttcatcaatttggggtccgattgcgcagcgttcgacctcaacaatgtcacaccacacaagaatgacttggacgtcaagatggccttttcaagtgctatcaagtcgtagatgggtaagagatgcaaccactgcaagactacgttctgagtagtgatgctctgtttgtttcctcttattccatcggtttcacagtcaagatactctaacttgatctcagcctcttcgcttggaagtaaacccttattgtgagcgaaaattgtgaaaaagtcctcaaactcagcaatcaacggaaggtacaactcgtcctgtctctttctcaacgtacctctgtattcgtctctggtagtgaaaatgagacaagtgtctgtgtcaaggtatctcaacatgttgaacttgatatcgtccaagtcgcctaccttagctatcatctcgttcttctcggaaccagcttctttttcgtgaatattgatcaagtcaatagaacgagcagctatcgaggtaagaggcatcatgttggtcttgattttcaagtctggtaagttcgcccattcgttagcgatcaagtaagcaagctgtttcttggaagaaggcaatgccaatgggaagcccaaaggtgttttcaatgtcttcccgtccaactgaacttcgtacaagtccttcgtagcatcatagtgggtatcaaccttttcccagaacttggtcaacgtcttggccaaacggtttgtatcggtcttggcgttgttttccactgtcttgtccaatcccaacagtgatgcctggggtatgaaagctttcacagatccggaagtagagtacttactaatggatctcaataattgagatccaccaacagaacttctacgaatgaatggtttcatggctactactctgcccgtagccaggactttggcagaagctactctgagcatgttttagtggacttatttgcggtttctgaagaataaaaagtgtaggtgcaaatctggaaaatgtatggaagtcgtgaaaaatgtgaaaaatcgagaatatagtattttttccacgatcagaaactctacaacctcaacagtagaaagcaaacactcttaacagtaattgtgatatctactttcctaaccactgctttagaatatcattggtctatacatatctacgatagctatctactatatccatagcactctacatttttgaatagccattctgcaatcattgacctaatttacatatctaccatacaacagtcaaaatggaccaacaagccctacagaagatgttgatcgagatggacaaccagttgagcaaatccagagctgagttgtccatggtgaacctccaaatggaaagagtggacaccaacttgaacatgatcaaaagcacaaccggattattgaataagcattgtcaacccaaggagaatgtatgggaaggtgtaggcaaagcatttgtagctatcgacgtggatgactacaagaagaagatccaggacgatgaaaaggagtttttggactccaagaagagcttgaatattaagaagaactacttggaaactacattggagaagacaatggacaccatgactcaaatcgtgggcaagaagccttaattgtaatatagatctatatattaatagaagaaagagcatattacttagtaggtgaaatagaagactatgtactacatcatttgcacgagataaagtagcgtagactagatcatctcgttggtcctaagattcattgtagtagcaatacgctatgccaatttatcaactcctacatctcatagcattctgtacgcatggatcttattccatcctcgtatcatctcctgtcttactgaactcatcacgatcacttcacggacagctagctgatatgttagtcaattcattaatcttcctcatcttcgtccacaccatcatcaagaattcgtctctcaatatcatcctcctctttgccagttatggccagcttctccagcttcattctttcagtaagaaaaacattgatctgatcctgaagagttgtcaactgagcccttaaatgtcccaagggagtatctctggcttcacttggcttgtctctgtcttctcctccagcttttatgacaacttcggagatctgcgtagtctgcccgtctgtcgtatgatctccatctccaggatggaactcgtgtggctgctccaagtctgctgccgagtacacagcagttggaatcaaactcatcgctgtagttgtaaagagaaagattgatgtcttcggtagagtaaaatgtcaaatatgtatgtggtcacgtgattccttttgaagtgattgcaaaatttgtagaaatatggagaaatcttgacaaaaaactggatactaagtagataaatttgaaactacaataaataaaagctctagggaagtgcaaaactaacgaaatgtctcatttatctattgtttatggcatatccgcagaaagtagtatacgccagttagatctacaaaatcagtaaagataaataacgtatatacatagaattcatacttaaaggattaatgtatacatagaatcatcatgcagtgtagtccttgatggggatcctttcagcggtgttggagtaagcattgaatttgatctcaatgatatcgtctgtagggaagttcaagtaaggtatatcgtagcagatgcaagacatcaagtaaccgtagaagaccttgagaattgtgtcgtcagcgatgatcaagatatcgccgctcatgcgttccatttccaagatcaacggctcaatcttgatggccaagtcgtggtaggactcagcacgcgagaatcggtagtgataaggatccttgatatactgttcgtattcatcaggatacttagccaggacttcgtcctcggtcatatttgctactacaccaggatttttttgagacaattggattctgtgtctgattttcacatttctgtcagcgaagtactgtgttgtttcaatagttctttgtttcacagaagtccatactacaagcgagtcctggtcgattccgtctacaccagctgcaggctgtctttcgtctacggagagttgccgtttcaaaactgctggtctcaaacgagctagatctgggttttccttgtcttcctcgtcttgaaagtatgatctgccgttcttcttgacgtgttcgatcaacgacttggtcaagttgaaggcgtacttctttcctgcatcgtccaatggaggatccttagtgtaatccaacaggttcttgtagcaccgagcaaagaaaaccgaccccagcttgattcgtgagttcattaagtagaacacaaccttattgatcaagtagccgtaattcgagttgtgcaactcgattcgctcaccaaagttgatgaacttgatataagacaatgtcgcatccttctcgcccatattctggtaatagggcgccaaagcgttgatccgcccactgtagtccttataggccttgtcatagtcccagttgacatagtcaggtgatgaacgtgctgcctcctccatgttcttcatgatgatggcatcgtctgtgaccaagctctcgatgaacaacacctggatgttcatatcagtgaatttcttctgcaacgcaagtctgtactccggcaaggcgttgacagcatcgtatatggccacttgacccttgtcgtttttgaagaagttcaacatgtcgttgaggcactcgtctacaatcttgtttcggatttcattcgcacgcttgctgtttggtgacggaacaaaaagatcatgcgtcacatcatcctcggcactggctctacggtaatttcccaagtggaacgaatgagtcttgactccaagccatcttaagtatcttgtcaacgataccgacaagtgggttttgcctcggccgggcaaacctgccaaagcgatacagatcttgccggcatggaacaaccggccagactccgtggagtacaactggcctccaccgataactgaagacagcgcatctttgtggacaccatcttcgccagtgatgtcgctgagtcgacggtgaagctgggcgatgtcggagtccatgtcgaccaagttgggtttgtcgttgttgtggaatgaccatctcttggtggttcttcgctgcgaagccgttcgagaaatgggcgcagagccaaacccgttgaagagctcgctctcgtcgtcagaatggatagcgttatcagacatgattacgaaatcgatatttaggagatcggtgctataatttagtgagataacgtttagaaattcagcaaaaaaatggattcgatactcagataaaatggacgatagaagtcagtgtggtacgatgtgaaggatatatcaaaaagtaacaagaatgaattagtatgaaggataccaatcacaaattctgaaaaacactaaaagagatatctttttctggagaacagttataatcagctgtctcctggatgataaccttccccagagtgagcagtgtgtgggaaccagaacggggttaagcgagtagttagtagaattggtgatagactggaaggactaggaagtaaagtgtaaccatttctaataattgaaagagtagatacacaaagaacattaatacggatattgtagagtcttgtagatactaattttcctaatctcaattgagttttcatttttagttttcgtgtggttacagtatgatgaatcccacaaacactagctaagtatacttggccaactacacttcctggacctgtcaccagaactaaggactatattcactggctacagagttaagcagttgagttttgtctcgacaaattgtcttcaccaaaatgtatttaaatgagactattggaaatctggagtaaccaatttaatgttgcatgaatagatatgaactaggaaagcaatgtcaggattggcaatcgtactatctactgtaggtgccttttctgaagcagtatccaacaaagaagattaatgatacaaatcttccatagtctgccagtaataattacaaggctatttttccagggtcagctttcttgtggaggtaacaaagattcttctgagctacagtctagaaagacaaggaatgtaattagagcagtagatagaggcgaaaaaatggataacagcatgatttcctaatcaagagaactaatttagaacagtgtgatatgaatagccaatagtttcaaattcatgttacactagcagactactttgccatggattcaatccactcttacacactacatactatgtgtttcttgaaagtgaagttttcagacattagaactacaatatgccactcaatacggaaccattaaaatacattcatattatataaaacacagaatttagatgtctcggatattcatcctttatgtatagaatttatgacaatatgaaaataatttattcgagcttaccaccctttctttcgatcaaggcctttctgtccttgtccaagtgcaacttggtgatgacaaccttggatgggtgaatgttgattgggacggaagcaccgttggacttttccttttgtaacttttcgatttggacagcgaacttcaatctgtagacggagttgatcttaccttcggaacccttcttggaacctctgacaaccaagacttcatcttcctttctgattggcaaggacttgatgttgtactgttctcttaattctttagacaatggagcagataacaaagctcttctttccacagaggaggaagtgaagtaagcttttctggctttagaacgagaagaagaaacgtctagaaaactgttagtatactgtttggtcttattggtataaagctgtaacatgaatcgtggagtcgagctgagtacttattgaacaagttcgaacgttaggtatatggatgaagtcactctggatatctctgcaatgaaaagatttcaactggtcattgggaacttgagatggggacttgaattgcgatgtcttgataaaaatcttcaaaatttatgataacacttggaaagacaatgacactacaggattcactaggttgaataccttcatctttagttgatatctaacaactgcttggacaatattatttgacttggaagctacaattttgtcttttttcgtatggataaagtgatcactgctcaacttggattcatttcatcgatatcttcaaatagggaatgtcaaaacctattcaactctcaagactctatccacgactatactgtattccgcattcttgaatcgatatttaccttgactgattttggccatctttaatgatactagtacttagcaaaaaggagttacctaaacctcacaaagtgtttttaataaaattaaattttcaccatactagcagaatccaggtgaaaattgttgctcacagtgtgaaggctataggcagtctcagcgctgtagggagaaaaattttcggaagcgaagtgcgagtaccagattgagggcggaagccctaatattttcattggcacatgactaatttgagagactaatgggtgcaaatttcccttgaccaacaaatacgtactagcattcaggctgatggagctaaaagtgcttttatgaagtagtatttatgaagtaggtttcatcagaatagtacagatacttcttattcgctatccaaatataaatatttggtatgttattctcattgtattctgggtatttcataaggttgcatacacttgtagtgatctcagtgcacttgctactctaaaatacacaaacgacttcgaactatagctcaaattctttatacatgtaaagattgacaactaatcctctcatattctaactgggaatgcttttgtattgcaaaaattagcaaaaataaattgttactagcaagcccgaggcgggactcgaacccgcaatcattatctccggaggataacaccttaaccaattaggccacaagggcttgtttgtaacccatgagggacactttttccaccgttcgatacctaaacgagaacatccgtgccgcaacagttaaaaagatgtcagaactacgaccaatcaatcagccagagggacctctagggggtttctctggtgaaagctcttcaaatcaagccttaaacgagccaaaaccaccggatattgaccgaaatccacacgaccatgtcgcaccccctgatctgatggacctcgatggcgagtccacagatgccgatgaaaacggcaatttagagccatccttcgtgactgcagtgtcatctacctctgaggaaccggcccaactacgggataatcccatggacgagctggttattcagaaccagaccccattaagtcctactatggaaagttttgaaacctcagtttcggaaatttttcaaagtcacgtgcttgacgaggtacacgaccaggaaatggctgcaaacgatgataatgaaatggatcacatttctttaaattctacaaccagcctctcgaacttgcccgaacaagaagattctctccttgtacaccaacttaaagaaaatacaaaaacccaaaaaaattctgaatccttacaatacttaaataaaaaccaaaaaaactccgaaaatacaaaactcccagaaaaaaatacacaagaccttgaagcagaggaatacccactcttaggaacctcaaagagttcttctaagaaaaggattcatccctcaaaccccaaggcaattagatctactcctcttccaaaccctaataaggcaaaatgggcagatattcttcaagatgttcccgataaagaatccgacaaaatacttcaaacatacagactgaaaatggaggccctccaagaacagatgaagatggacgttcctaccaccaatgaagtctttgaccagtttgacacatactcgacacttatcagtcacttagaagggttatcggaagcaaactataagggccaacagaaaaggttcgacgactgggatacgcctgaggaggtaagagtgtcaaccctcagcacaatcggcagaaacgttgctgaaaagttagatgtaagagtccacattgactcatttgaatacagactgaacctgttaaaaccccaaatgagcatcgaggacaaagctaggataattcttacccactttaaggagactatacctgataggttagatgagttagaagaacacaccgagcagagtattgccagtctcaaaaaatcacttcaattttaccaaaaccagatatccccaggggaccctctggagcaggagttgaagcggggcatcaacaatacccaacttgaaattgaagagttggagaaaacacttcaaatcactcaaaggatttatgacataaaggagtatttccacatacatatccgggacaatctgcacttaaactttaacttctccattactgaaagtaatactgtagttccacgcttcaaatctcaaggtccaaagaaatggctgaagactaaatttgaagaaatattcgacccttactacacaggggaagaaggcaactacagatttacacttaaacttattcctctttctagttatcccaacgtctttcttgtgggtataaaagccccaattggaaacaaaaacttagacaatctattagaagcaatgttcaacccaaatacgcttgacacgtatcaagtacctcaatacaggtctttacgcagggaagaacgagagcctatcgtatacgatattctagctaaacaccgaagggaagtaccactccacaaaggcagatcgactctgtcaagattccagtctgctttctatttgattgcgacggaatcggataggattccaaacagaaagaacgccttcatgcagggtgtacaactagacattatctcctcataccaattctgtttcaaatgtcacaccaatcagcactcaaccaaacgatgcccaacattcaaggccccggttgcaaaggtaccctatttttatcagaacgaatcccctaacaacgcacgtccatacaaacaacatcaaaaggacgacgatgggtttaacccggtgaccaaaggcgctccacgccgaaaggaaccacaacccttaatctcccaacatagacaaggaggtaatcgattcgcgccactcgccgacctcccagaatcgggagtaacagaacacgtgagccataaccagtcagcacaacctgactcccaccaaaccatgagagctatcatgcaccctaaatctacaggggtacctcgcaatacctcaaacaacgagagaccacaagatcaaatccaaagggaatacatccaagatgatgatgacgaaacagtaagatacaccgattcagacgaagatgaagatatccgtgacgatgaagcatccgtcatccttagccaccaggttcaggaccaagaaatggagctcctcccagaaactacaatcaatgccgctggcaacaaaccgaccagaacacaaccgctccttcaaccaatcacgcctcgcccaagaaagcaaggtaaatcccttgtcacatcaaaaaccaaacccctagcaaccccaatctcttcaccatcctactcgggtcgcctagcccctctcacaaggaagcaaccgaccccttactctcctattataggactctcccactccaacaaaagtcagactctaagacagtcccaaagggtgcatgaagcacttaataagactcttagtttaagccgcgacgaactgcaggcacaaaacacctcagccagccgcatcccaacactacgagatcctccgccaataacagatcctcctgccagagtcatggatatcacggattccccactaggatccactctaggggaaccggaatccacaattttggacaacatggaaagatctgacccttcactaagatttcaaagtcaaagcgtcgacccaacacaagtcgactctccaagtatacaccaggacattgttgaccatactaatttggctcatcaaccggtaactgtcacgattggctcacacgaagccaacccctccaacacaatagattattaatatgagtaatctactagatacggcgataaccaatccgaccttaaaggcatcggaagtgaatcatcgcaacaacttaataacgattagatccaagaacattcaacgaaaccaggatcctgcgaaaattcgagaactagcacataaatgcgacattctcctcatccaggaaactgttttccactctcaaaacctaaactacaacaacctgttccaggaaacctcttctacttcgctgccaaatttgacaccggaatggattcatgggctcctgaatacattgaaagactcccaaaaggagttaatctacaccaacacttcatcacgcactgggataatcttaaatctccagtactcccacttccagcaaatatcaagtaacaaccttgatctagacgccgaccttgctccctatgcaactgacgccatcatcaaactaacggagaaagaggaatacatcctcataatatccgtgtacggcccaagcgggaactatccggctcaggccaagttgtttacctcattacactcccaaattgacatcatcacccaaagcttcaaactaaacaacgcaggagctacattccacgtctgcctagggggcgatttcaacatggtccttgaccctgaaattgactcctttcacgtcggacaaaacacggaagtcgcatcacgcgatgcattcaatgctatcttccatggcttacaactccacgacactctcagagggctcgatcctcaaatcaaattattcacgaatgacaatttccgaaattgtcgccgcctcgatcgtatctatctccccacgtctcttaaagacagggtttggcgataccatcaacacaaagaaggcataatctcatcaactcatataacagttgaaatagaccttattatccttccaaaagcgaccttaaaaatcagaaaaccccgcttcatcgtaaaggaccactggctagacaacacacatctcttcagtatcttacaacaaacaagattttccgactacactgcattcataaaacgattgcctagaataataggctatcttagaaatcaacagtcggtcacttcccaaatagaagagaggcaaccaccaaagatcttcaaggatctcaacgaccggttcaaaggggcaacccatgcagcaacaattgtgagtacactcacaaccgcagatcgggctcgcaccgccatcacaaccaaagatatactagagatacaacgagaacaccttgcagcgctttacctggattcccaggcccaagaagccaaactctccattaggaggtatgtacagctgttccgtcgcaaagtatcagccagcgacagtgtggagcttgaaaagccaatcacatatgaagaacttacgtccggattacagcggactgccaacagctccacgccaggagaagatggagtgacctatcttttcctaaaggctatctgggacaaggcaggcccactattaacaaaggacgcggagaatatcatgcaaacgggaatattaccagagtcaatggctctagttctcatccgtttgatacccaagagaaaacgtaaggacctcacggtcgatgatttccgtcccatctcccttattaatacttctttaagggtgatttcgcaggtccttaatatgcgccttcaaaaggtgaccaaggacctcatcggctatgaccaatgcggctttatgcccgaacgccagatggactttcaaatccaacggttccgggccctcatcgacaaagtatcaaaagaccccgagactctgaaaagtgcaaatgtcattatattggacttgactaaagcatttgatcggatatcgcacgactatttgtctgcagtactcgaccaacttggctttggccccagattcaagcggatcttgctcctggtaacgacacaacaatttgcagccatttttaccaacaacacaaagtcagagacctttccactcaaacagggaacgagacaaggcaacccagtgctgcctatccttttcaatctctgcttggagcctcttttacaacgattacagagtcggctcgagggaattccgattcaactcgaccatctaccaccgctaacagcgaaatattcagcctttgcagatgatctcacagtttttgtgaagggaaccagagatcatgaaattctcaaagaagaacttactctatttgaacaagcatccaactcgttggtcagtatcgccaagtcccggacctgccactggggccagtcacctcccgaagatgttaccaagatccttggctttgaagtccttgacattagcaccactgactacaaatacctcggagttccgcttaacggcttccgatgggattcgtatatctcctctctttccacacagctacatttccacaccatacaagaattgccaattcatctcagatgcacggggttcaatacttacatcttctcgaaaatttacttccgagacctacatgatcccatggcaaatgacaatatcaagcacatcaaaaagatggtaaagggacatctccctcgcattagcgacagaaaccttagtagcttgaaaaagaaagggggcttcggactactcaatgtcaagcaacagctcttaggaagacgggcaaaagttatctacgaaacgttgacgaatctggtggattggaatctcatagttctccgtgacaaacttcaatccttcattgatacaatttaccctccgacacgcaatcaacttgatcccctgaaatgggacatcgtaccgtggtaccttttccttgtgaactacgcggtccaaaacaaagatcatgcaatgtcagcgtacaagacctacaatcaattcaccagagccgaaatagcatggctcgaagcatggtttaccatcattaagccgaaaaaccgctaccatatcccggatgaaaggggtaggaggttttggattaattcatattttaaaaagcccttcacgcttaatgagaaacaagagatggtgcgtaacccgccacttcagctggattgggataaacacataaccagccgtgttgatcgcatgacatttacccgtagatcagcaaaatatgagcaacaagccccggtgtgtagctccagtacgctacttcaaaagtttcccctgctacaggacaattaccccaagttttggaaggctctttataaagtacaacttcttcatcccaaagggacagaggaattacacagggtccaccttggtcaccgcgaacgccacggcaatccggaggctcttgaagattgtgtaatgtgcctcaactcaattgaaagacggaaatactttcaccatacctaccaagactgtgaggctagccgcacgttttggaatttgttagggcctgaaggtatgaacctagatttaaacaacatcattggtaagtttgaacttcccgtggctgctttcctttctctaaatcgatacttccttactgtctacttatttcaagttcgacggcggaacagtgaagacagggaatccttctctctgtcaacactttctacttgggtatcgattttgcagtctagacgtcttatttaaacattttacaagtccggtagcatataccgttgtcaagttttctacagttttctaaggatatcacctagtttttaggtaatttcactcggaggtttttatcctaggatttcctccaccattcggtatggattagaggatgatttatatactttgtagtagataggttagactttagtcgtaatacatgccatttcgtcaaaaaaaaacagttaacagcaagttggtttcatttcacctttattctttataagtgaaattaaaatactccagataggcaagcatctattcactaagtatttctatacatagctatgtaagctgaaggatgtctttctagcaaaaaatggagcgaatgggaaagatgaaaaactcagatctccgtcttcatgcctcctcgtaatattgcttcaaataaattgactcaagaggcaaccttcaagaaagaacagacctgatatcgaccatgtccattcagaatctctgtgatctctttcgacttaaacattttcactcattgcacaaataaacacataagagaaatcttcgactcgatttcgcgtgaatctctatcttcttccatatcccagtagcaaagcaaaactaaaacttcccacaactaacaagagctttcaaaacattgtgacaacttaaacttcctaattatgccaacccaagtcaccaaattgcaacagcctcattgtccaaatttgcagccggttgcaaggccaaaatgaattctcactaaaaatgagcctgtcaaaagagcccgaaaaaaagttgataaaatggtcaaattatcatgccccacttgaatctataactaatttccattcttcttcagatacatccatttctctgcacgaattgtttgctcatcgctattatacatatcacatataatactttggctcattttcagctttttggccatatagctcatcgatctgcaacctaaccatgtattccgttcaagctgtaggaatcagatctgtggccacggctttgggcaagtcccgaatctcattgagtccagctacatattcattaaaaatgtacttcaacagttcagcctcagcggccagttcttccaacgtttctccagctatcaatttcgataagattgttccattcaattataaattttcaccaagttcattttcttcaaatagtaaaatttccagattggattccaaaacttttagattctattctacaaagactgcaccacctcctccacctccttctcacgacaaaaatgaaaagggcaagagaatcctcaacaaggctacccgagcctttacgttctcgttatcttctgtcattgttcttgctgctactggtgtagccgtcttggtggtgtacttgatcttgtcggagttgtttcttccttctggtgacaccagaacattcaacaaagctgtcaaacttgtagaaaagagcgaaattgcccaagagttgttagacttcaaaccaggtcacagattgaaagcatatggtgaagtccctggcgacagatgggtgcggaatagacccgttcaaagtatcagaaccaagggccaagacggtaaagatcatcatgtgatgaaattccacgtagaatcagatgctggaaagcatgcaactgtcattttggaacaaatagatacttcattctggagctcggagtttgcctacatcgccttagataagccaggatccaagagagtatacattgtggagccaagattccagcctaagaattacgtacctcatcttaaggatagtaacggattcttgggtttaaagtggggccctaagaaagataattaaatctgtaaatactctaacgtcttacgattaataaaaggatttaatgattggctgttgattcgtagatacactaaatcgatatgaaaaaacactgtaaaaatactataccgattagcagagaatatcattagaagcacaaaagaacaccaattgctattccaaccggaacgagacaactgagtgccttggcagtttgagtgtatccaccatcgttctttgcaatggacccattggtgccgttagctaagggagcaagaagtttgggattcagaggagattgctgtacttgacgattttccaaatgggggtattgaacttgaggatacgtatttttgaggagactccagaagtagttgtactctagccatttcttttgtccgtcttctgccaaccttgtgatatggactttgcatgattctgtcaaggttttgtttgactttacagagtcatcgagaagtgcttttccatcataatcgcacaattctgtcttgtttcctccttcaatgtattgtttgttcaaaacataggaaagtttctgttggagcaggcaatcagaataaggaccatagacgcctgtagttccattggcactaatttcagagcagtcaatattggaacatatctccttcaacaagtcgttgtcaagattggcaggattagcggtacacttgaacagttcatagatacaatcacacttgccactactgggtattagaggaagactggtgtttgctttccaaatgtcattttgtcccagacaattgagttttggaatttctcttgccgattcttcagcagcggttatgccttgaggaatcacactattatatctctgcttaagaaactcaaagtcttccaatttggcaactgaaccatcatcattttccttgaccacaccgtagttgttaacttcttgaaagtattcataaacaattcctccagaccatacctttgccattgtacttccgtagagagcttcaacttctgtaaagggacgcggagacacagcattacagccgaactcactaaagaaaattggaactggaaacttggaatattcaatggtgagatcacgatagccagaagtggcgtaagtggagtagccacaccattcataagtgttaagcccaaaaaagtcagcagtgctacatctcgtagctgggtcttcacagacaaagtaattggaaagcagttttctaatctcgggatcgtcgttagaagcataaccaagaggaatctttctgtagccgctgttcttaatgtacttcctgacatccctgattgcagctctcacaaagggagaagcatcggtattgtactttgtgttggtgacttcgttaccagcaatcaatcccaacaagttgttgtatttgtgcaaagcatcgacaacagaagtataacgtgtatagagagtagtatcccaatttgggttgtttctgacaatagacatttcagattctgccatatcagccaagacgtagattcccttacttgccaaagcattcatacaaatgtcgtggtcagcatttggatcaatctggtaaactctgataacgttgacgccaagttcaactaaaagaggcaaatcccttaaacaagtagtaatattggctaaagagtcaatgtagggaacttctttacttctatcaaagtcctccccttctcttctggatctttgataggcaatgcccttgaggaagaattgttctcctgtatcattgtagaagaacttgtttcccacaatatctatagtactgatatcggaattggtaacagcagccagagaaaatgctgtcaaggcaacgagagtactgatagtaacaaaaaacttcattttctgatatatttggagaatcttttgtcagttaataaaaagggaaagtacacaagcaacgattgcaaaaactaaaaacggttgcaaaattaactttacccgcttgagaattggtagcgcacacatttacaatctataatcgtacattatcataattactttttgtcagtctaaaaactagaagatgcctattaactggtgtaattcctttcggcccttgcattctatcatgaaaatatcatcgtttgtgactttgacaagtaaacctgcttttccaattcgttcgatacgtttatacatctctgcatcacgaatcaaccagttgaactctgtttcagctttgctctctatatcagtttttttcaacaccaagttgaaatatgacttgttggtgaaggattcggttatcagatatacagttaaactgtacatggaaagaattttccatgaagaaggcgtgctgatgctgttataagattctagctgcttttgcaacctgacgggcatctgattcaacaagatcaacttggtgttgtcagggttagtgaggatgttgagattggccgcctcttgggaattgattgaataatctgagccacctttcttcattctcgaaattggttttgccgatttagtggttgaccttgattcactcgaactgaaactgctataagtagtggatgcacttggttggcactttccatccattattgaagaggttattgtaaaagaagatggtgctaactccgagttttgtaaggatccgtaattattattctttgcatttgctgacaaaacccccataacattattgacgttggtaagaatgctgtttcccaatgccgaagtcttgcatctgaccataatttgcatcttttcagaagtaacggaattaatggaagagatttgcaagtccaaagcattaagcttgactgaagtttgccctccaacgatgtccaacaataagattggcttatcaatttcagcattgtttgcatcagtatcctgtttgaagaatattatccaactcttgttaagatgatagttggtaacaattcttgcaaacaaattctcgttaactgtgatcatttcccacttaccatacttaggtttccattttgacaccttcatcgccttgggcgtggcttctgtaatgaaaaattctattgagtgatcgtcgttgatcatggacttgatttcatcagacacaaacaattcttcctctgtgctttctagaagttccaagttagtctgcgagtcgttgtgttgaccgaggcttgcacttgaaccgttcttgtactgtttgaagaagtatgttgaagttgaagatggcaatgcaaatgcagttggaattgctgatctactggattcagtagagggagttgattcttcactcttatttgtagggtttccagcatcaacctgatccaccttactattctttgttgaagaattaagagttgcatccgagtccttcttcatcaagtcgttagtagaaatactcgaagtaaccgaatcatcagagtctttcttgttcaaaatgcttgaggaaaaggaattaaaagattgatcagctgcgttgaaatgctttgaagacgtgaccaacgatctatttgctgtattgaaaacactcgaagttgaatccattgatttgtttgccaagttggtatttgtagaaactgaatctacggacttgttaaccatttggaaaccagccacattatcgtttaagtttgctttagatccctttttgaaaaggttgaacaacgacttttttcttgttggcttcttctgagttcccggggtgccagacccaacagaaggagaagatccctttttagaatttatggagacttcagattcagcaaacgaaggacggtagtccttgccgaaattagaaatatcaatttcagagccagtcgacaattgatacaaatttgaactacggccagtggcaaggtcgggaacagatgaaaatttagtttgctgtccagaatggtgtttgtcagacaaagataatctaccagtttctgttacaatattgggcaatgtaggagccttaatcattactggtgtgccttctacatctacgatttcgccctgagaagaaataggacgtcctcccgcatcacagtccaaggaagattccattgttctcttgtttataaccttggttgggcatgtgtctccgtcagcttttgtcgataccaaacgagccaatgtagttgaagaaacagttttttctatgatgctcaaactgcgatcatattgagtctttgctgagtcggaagagtcttcagattgaatcgaagtcgaagatggttttctcaactggaatgctggaggtggaggaggcaagattggtatctcattagttccattcagtttctggatcgagttgcggaaatgtttttccaattgtgacaatggtgaactcgactgctccgaagtctcttggatgtagagcttgggtttctgtggagtgtggtatttttgctgttcttctctgtccttaatgtcctgtttgtgttcagagtcagaaagaacattgatgcctaatcctgccatcttggtgggactatttacaggagtaatcaagaaggagtcctcccctactggcgaatgttttgcttcctctgggaaaatggctgtgagcttcttgtgccagtcatacaaaaactgggaatccaacccagttatggagataactgagtctgtattctcgggatgagagaaattgatagctttcaagaacaacgtatccctcttgaaatctacagatacctcgttgactctaaagggaggaaacattaacgatctactgaactcctttgttccagaatggacctggagaatagccaatgagttgtacttcttaccatgagaacctctactgccaccaatatccaataaaaccaactctatgggcacttccttgtgatccttgtcgtgaagcaaaagaggctcatcttttgttctttcgacaatttgttccaacttgaaaatacccgagactttgggagggcctctggaaggaggcttgtgggttactgtaggtgttgtgggtgtcacgaaggcattgatgttggcaaaaccgatatcattcaaacggctcagctcgagaagctctcggtagttattaagaagtctttccatgaactccttgattgtggacaacttatcgataacaaacggatttctcaaaagattcgaagtggcagcaatgaaatcaagataatgtacacagttagttaggggtcccgcaaatgattctactttgtccaaattcgtgaagttgtggtagctatccttgctggttatgaaggctgcgtacttgtcaaacaacaccatggcatctgcatcaagccagagaatgaaactattgacaaaccctttgtaggtgtcgagttcgaattcgggattgtctatcacttcctttatgtctgcgtccaagatggttaacaactttgcgttcttggtgtacaatcctcgtactatggaggtgatggtagacttggaggagcgggccggcttaacagctccgagaatctccactaggcagttgttctccgccttctcagcggcttggagcagcttcaatgcttcaagtatggtaggagacagcacggtcatgacagaggttagaatggatgaatgaacgaaaatgcgaactaattagttgaatgtgagtagataccgaatgaaaggatgaagaattgatttttcagcaggtaccaaattgggtagtttgagtagataccaacgatagtggaatagtggagctagacggaaaccgattttgttgtttcaggctgaaactgttgactatgggaggtacgctatcgagcagaagcaagcagactccagcagatgagcacagtgaaaaatataaaaattaatgctgggataaacaaacaagacgattagaaacagtagtggctactcgcaacgtaatggcaatgaatgctacagtagtctaatcgatagtcagatatatccaagagataaatcgacactggtaaccatccaattgctccgtacactgaagaagagctggagaccctaattatattcaccgccggccagacaggatagcacaataatttcccaggcagaggcagctattgtgttgtttttctttcggtccttctgcttgcagctttagtttgtgtttagatgcaatcaattagacaacaccgatggttagcatggcggatctgcattggttgcccatactttgtcccaatgaaggaaaattcacccttgcaatttgacgcgtaaagcctccttggacacggttggtacgcgtttgcgaatttttcgtccttattttttgttgcattatttttttgttcgagacgtgtatcgagaagagctccaccgctgcaggtgaaaaatggagatttaccaattgtctattaatatcgatttacacatacagaaatacgacggcaacaggataaaatacacacataaataagatacagcttgttccaaaaaacctgactgaaatgcagtaactgtagagtgagtctctttcagtaccaggtaccggctacgcttgatggtgaatattcgctatcttatctgcatcgtgtcaatggctggctaacgcaatttcgcctctccccctttttcatttggcgttctgccctcaaactactggagccaattgggtgatgcaagtgttgtagcccagtacagtcataatatattactgggcaacttctgcaggcaggctgcttcggtactctgcagacagagcaaccactatatcgttgggaggtcgtctattgctgtgagaatgcttgcgtttcattctctgattgatctctgggacagctccagacatcgacaaggtttggaaacaagaaaagccaagaaagttcttctaccgttgtcactaagcagtagtgcatcatatttcgcaaccgtatgaatgtgcaatcttgcagaagcaatgtgaaatttacggataactgtcgtaccatgtctaactttgggagttacagatgaatcaaggcattttctcagttttaggtagtcgtaatatcgttcgagactccggttgcttccagaagcaattaggagttacggtccccactttacctctttgtggatctaaaatactttcattaacatgatttgaaacctgttagtacttcactttttgatccgttcttgatgagtctactttgcaagattcttgatcccattcaatcaatgtgatctgaattcactccgtagacttatcaagtgctatagttacatgtgaacaacctaggttgctattccatacaggcgaatgtgtctaggagcatagaaacgtctaggctgtttcagcttctggcattttctaccgctgtattcgtttgttatgcaagattggatgcaagggtcgctagccattgtgaggccgtatgtccctggaatggacttattccacaggcatgtatggggtcatgtgcacgtgattctaattggaagtgaagcttactagagatggtcaattcgtcaaagcaggacccgaggcatctagagctatgacatatgatttgattcccctactgaagtatgcctgtcggagccttccgcattatatttttcagtattctcttgaggtgatccagtcaagaacaccatccaaaccttcacctgtcttcccgctaacaagctgaacatcccatttatcagtctgaggaatctgcgctttcaagtccaatgtcttctccactgtgtttttgatagaccccaacagacttctgtctgccaccagatcaatcttgttaatgagcactattaagtatacgccttctagccgatcttgtagaatcaccttctctctcaattcttcgtaggactctttcaacctttctaaactcaaagtgtccactacccatagaactacatttgttttctcgaagtaattaccccagaaacttcgtattgtcgtctgccctcctatatcccacacattgagtgtgacaccgttatgagtgaatgtattgatctggaaccccatagtcggcgatatggtgctggtatcctctcctaggatattcttgattatagtagtcttgcccgagttgtctagacctagagtgaggactctgatctcgttgtctttgatcttctgtttcttgatgatagtaagaagtcccattgcagttcttgtaagacgaatatatctaaattgcgtaactatatatacatgtaaaagatttgaaaagtaaatctaaatccatttggataccgacgttgactggaattttcaagtcctctatttgctatggctcgtaagtgaacctcgagtatatgtctgtcttagttgatcaaagcaaaaattcaattgtagacactactctataaccaattgctttctcctattgtagatgttatctctccaaaagccactccagtctatctagctttatagcagtcaagagagtaagatcaaatatccaagaatacaaacccaatctttctattttggtttcgcactgtataattttgatttctaaatcttatcatatacaaaatctcgattccaaatctcaaattgcagccctttccatcgcaaattcgtttcctttttttattcgttttcttccaaacacaccgataactaatatctattccagaacttgtagcagtatgtatacgcatcaatgaaatctcgtaaactgtctgcttctgctaaaaggcagagctctcttttcgaattcaccagaccgcgtcgtactgagtcaattgatttgacccaagatgagaatactagtgtaaatacgaatgttgctcccagcaacagagcaaatttcggaactgctggtgattcagttatagagtctaatatgcatttgaatttggataccaaaattgaaaccaaaattgggtcaaatatcgatcctacggaatccgattcggggtctataatagaaacatctgtgtcttccttcactagtacagtaaaagtttcttcttcagaaaagtacgaaacactcctgtttggagacttcattgaagatacagtcaaatgtccaatttgcaattacaatatcacgtactatgccattgatgacagaactagacacgtcgatttgtgtcttcagagattaagtcttgaaagcaatccatcaaagactcaagaatcattgcctaaaagacgtaagaaagcagagccggccatattgaaagagaaactccgttatgtgaacgatattacttctggggatgtatcttcaaatgtagaagtggagcgaaaaccagccaccgaaagtatagagatcttggatgcaactgtagcaactcccaaagtaaaacaaataaagcctcctacaaagatcattaactcgaagcagaggaatccaataccgacactcaaaacattgtcttttccagtagactcttgcagcagctacgaagtgtcagtcgatgcattttgttacgctccacatgctaccatagaccagtatttcttgacgcattttcattcggatcactacggtgggatatccaagaagtggagttacgaaagagtatttaaagaagacacagacttcgacaatgattccaagtatagaagaatcatctattgcaccaagatcactggtgtcttattgacgcgttgtttcagcgtggatcctcgtttcataaagcatttggaaatggagacaaggtacataataaaatcgttcgtagacatgactcaaggtacatcatatcttcaagatggtggattcccatcacagaagtgcgaccctggtctatatgtaactcctataactgccaaccattgtcctggatcggccatttttctctttgagtcctacggagtagatggaagctatcgaacaatacttcattgtggagattttcgtgtcaatgaaagcatcttgaagcatcccttattgtacagattcaatattgaaaatgagaactcgataccgttagacaaggtctacttagatacaacctacatggctccagaatacaactttcctaaacaagaattggtttgtgagactatcggcgagttattctacgatctcatctaccaagaaaacgtcgacgaaacactatcctcgaattccttgttctctaattggtttggtgtatttacacaatccaggatcactgacttctggaagactggctcttcacagtctatgagcaagaagaagaaatttttgatccttgttgggacgtatcttattggaaaggaacgccttgcaatagccattctgaagcgattgaactgtcccatttatgttctgacgataagcagtagaagagataaaatcgaaatcgtaaggtcctacgaagacgaatatcttaattctgtactaatagaagatgacttggcattgcaaagtaaagctgaatgtgtagttcatttggtgcccatgaaaattgtttcgtcggctaccgaattatcaaactacttcaattacaacaaatactatgagcactttgaacgatgtgtaggattacgtcctacgggttggagctttgttcctggaagtcggggaattgatgcttcagtggctgatgaagagctcgaaggagagttaacaatagacaacatcaatccagattcaaaccacctttcacaactacttagcttgatgactttaaaacctcagtactcatacatgagagatattttgccccaagctccattacccagagctgtacgcaaacaaaaagctgcacctgataaatcgttgtatagaatctattctttgccgtacagtgaacattcttcgtttcgagaattggcatacttttcaattttcttcaacataaagcaaattatccccacggttaacgtccataactcagagtcgattcgtctcatgaagggcataatagacacctgggagcaggcccgagaactcaaactaaacggaaatgctggagtaaaaaatgccggcattgaagataatttagtaaaactatttggcaaacttagtcttgaacagttttaacctagtatttaacggaacacatgaacaattttgtctacagtcgaaatggtacagttttactatgggtgcatacatatatatgtttatcagtgtatatgtttatcaatgtatatatatgatatgtgttatgaattgaatagatgcaattataattgaaacggtctgtgtatctgtatctgttgcacctgcccaacaagtcctgctaatgctacgcaatagctctctaattactattacaattgttgctgttcctaagccttaggttgctcgtttgcttttggcttttccttctttgagtcttccttcttcggctctcctttcttcaactcttccttcttaggctcttccttcttaagatcttccttcttgggctcttccttcttgggctcttccttcttgggttcttccttctttggttcttccttctttggttcttccttctttggttcttccttctttggttgctccttctttggttgctgctttgctacgggctgttcctttgcttcagcttgacctttggccttagcattttctttctctttagctagcgctatctctctggctttagcttcatcggcagcctttgctttggcctgcttttccctagcttccacatcaggcttgtccgtcttcgagaagtgctgacttaagatcttcgaacaagaagtcaaagtctcgcagtcagaccactgcactacaaaatcacctggaaaatagtgaaatttgtctactattttatcaaggttgacggcacgagaatgggctgaagcaattgttctagctggaataattgtcgtcttactcaacataaacggatgccattgaagaatgtgcgttaatgcagaatcgggtccatacccaaagttaggataggtcaaatacaatgggtctccccaagtttccaacatggccctacctatatggtcgttcttgaccaaaaacgaattagattctattttagagtcagactgagttataatcaatttgatggagtcagctctggcgttcttatacgttttaattgtgccatcaggaggtattataggtatctccctttgcataatcggattcaaggcatcgttttccaagatgtactcctggatgttgatggtcaaatccatgattaatccatcctggtctagataccagaaccacttcgcatgcgggaaagcgtgcattgcggctctggtagcatacaaacgaacccatttggccctttctttgatctgcaaataactaagcgagttcaagataggtaagaattcctggtaccagcgtacatagataccataattatgttggtgagcataattgactcggttttgcacgatcttggtcaaatcgtctactgagtacttctcgaagtctactgcagtaacaatgacgacttcggggtaccccttgagagagcttggtctataaactattttgtcctggttcttgaagtagtttttggccttggcctggtcggagacagcgttctcttcgtcttccttctgcttctggatgatggggttggggtcgtcaaacatatttagcgaacgaatcactgtcttttctacctctggaaaattgtggtctctcacacgtgattctttgatgagctggtgaaccgtcatctgcttcaacaaaggggcatgctcgatattggggtacaagtatcgcgagcttgacgggatctcttgtttggtggtaaggggatgaggtggtgggtaggagtggtcttcctgcgacaagaagataccagaaacagccaggaacggattgaaaaagagccaaatcactacaactataatagttagcaccgtcaagtttcgacgatggaaggtgtgaatacggccaaaggtggctggaagtggtagaaatgcctttggctgtttgccatatttactgggcttgaatgtggcacctagcattgagtgaaaaattgtagatttctatgcgatcggagtctttgcaaattcaagagtgaaaattgagattgtgaaacgaaatctgtagaatttgagatattgtagacgcaaacaaactcaaacgggaaaaatgtcgatatttcttcggaatttcgaatgtatagccaattgaatcctgtgtgttttgtttattgctgtgccagatcggtgtgtgagtttatatgaaaaaagcggatctgatacctaccgagctctatgaaaagcaaaaaaatgtaaaaacagcacacgtgactgctcctaacctgctcgtatcaacagctgagacaaaaacaacagacagcttgtgttttctcaatactgctataagaaagcggttggaagaagatgccacatcgaaatttctatctatagcacccactggaattgtcattattatcaagcaattttggcaccgtgcgggacactacctcacgtgacttttcaggtaccgcgcagagaagaatcgagtaggtggaagaggacgagaagaaaccgagagccagacagaggaacatgaatgtttaccggcaagaagcttgggtatgtagcagcttaacttataggctcgctgtaaccactttttgaatacaaattcttcttccacggcaatttccctttcatgtgttctatctgacagcttcgtattttagtccacacgatcctcggacctgcaggttgtcccaaagatgtacagttcagccttatgaggagagctagtgaaatgagctgaggataactctgaaatgacaactcacccagatgttctggatgtgtggcagacagtcgtatagatgtgatttacagtaaagcactattaattttaaaattttgtgtgtgcagcgtactctgcctgtttttattgtgatctcttaagtctagactgtaaccatataaatgaatgaagatcgatatatatatatattgtgtgttgtaaatatctgttgtatatacaattgtcatacacaattgcgtagttatactagtaaaacagttgtctatgtgctggaggttgcagcttccttgttgattctctcttcaatcacctgtagagccacttgtcttcttctctctgcaaccgagttggctacgctcttctgggcctgactgacctgctcttgtctcttttgtgctctcaagttactctgttccactgactcgtcgttaaatggggttacaactcccaaaaacacaaacaactcgtagcccttgtcaaacactacggacaagtatggtttggttatagaagggaagaactctactagctggaaggtatccgaggcatcgcctgtaatcaacgaggagtttgctgcgtctgagctggcacttgtgatgggcaaaagcggatcgacagcaaacgactggaagaaccgtaagtatgtgtacgacacaataaacgaattcacactgggaacaacaggatacaacgacctggtgaccaatgccgaccacaacacaacaacaactagtgctgtaaaaggcaaatgcttgacccggaaattgaccaaaccctggaacaaaacaatgttgtgttcagggatcaactgcttgaacactaccaagaagccaaagtagtacgaaatgcctccacccaacggctggtccattccagcaacatcgcctctcgcaatgttgctcacgatggtaacaatcacagacacaaagttggtgatggagcctacaaccaaaacaaacttgatgacttctttccagctccagtacttctctacatatttggtcagaacgtatagcaccactacagagattataagggctattattgaaacctctgcaaaaatagctgtcacaaccacccacggatagaacaacgtgaacctaggcaccaattgtaaatagggcacctggatgttctggaaagaaacaactccgtcaggactgtttgttggggtaggcaggataagctcttcacgatacgtgttgaactttataatgaaaatgagcccggaaatggccgccacggctccgagcaagatccgggtggaacggggaatattatgaatacgtataagtccagccattgcttaaatagaagacgaattggagtatctgaaaaaacttggtacaattaaattcgtgaataaattcaaagcacaataaataaataaagatttgactgatatctgcggctagtcgaatcatgtgatattaatcagttgactgagagaaaacctgtatattgcccacaaggttttcaggtgtcctatgggtcaaggacaactcgagtctttttgaactacagtggttggtgtcggtgaaacttttgataatttctaaacatccttttgggtcaggctaaagggagatttatgaaggcacaggttgaagaaactagacgaaatgtaccaagttaattccattttccgcctgcatatctcattatctaatgggtgcaaaatacgaacatttaattactctggaccgtatctgggtcactaatctgttccgatttcgtgagagtccgtcagaattcattctactgctcatcaccaatcacagcataagtttatattgtatgcgtgtagaaaacacaatatctctacatttactgtgggagtttctattaattaaatgctctatgttgttctcagggtttaaaccaaaatcaaacaagggagtggttcaaaagtttccagtttctcacgcttaccttcacgcaagaagctttcgatcttcttgtggtatttcattgcatgcaacagatacacgccgctgcgaacaccatttttcagagcagtgcatattgcaaacaatcgtatatctttggatccatcctgacaatcaagatctacattcaatctacaacaccattaatattttatcgtaaaataaacctgaattcaaatgtaaacaaaagtatataaaagttgtataaatacacactcaagtaattggtgaaaataatgtagcagtaatcggtcaattaacatcaccaaaatgattgacttttccaatttgtgggatgatctaaaaggccttagtggtgtaattgtgagttgcctgactcttgttggacaaatatgctggccaagtgtaatgttttggtctgtttggacctgtgtcattgttgtcaacctttcttggttggaacaaacccttggcaaatgaaatatctatattagtaccgagcgatttaggaagcttcaggcctgcaacagctggagctgcaataataacaacgaagataaccaaaatcaaaaagtacaaagaacagtattttctgaccattctctttctcaatcttgcttgcttcaaagagtagattggaggtctaatcaacctggaaggcttcaaccagaataacatcgtagagtgccatctatcaactaatggaatgaacaaaataggcaattggcagaacaatatgatatgagccaagacgaagtcgcccgcaaactcagacatttcaatgatcttagcacagaattcacgagctggttgagtgaatgccatccagcccataccagtaccgtaccacttaccagtccagaaagcggtgttggctttgtcgtgtttaaattctctggtcaagaagcacaaggtcaagaatttgaacaatagtctctgaatatagatcatagtagcaaaacccaataacattctggcaaatacaaaaccttccaatacccacatcacgatgaagaagacaatgtgaacaatgacagcaccaccgtgtgcaaccccagcaatgacagcacctgtcttcttgcagcacattcccaataaaggaccagcacaacaagccaatccaacgcagacggccaagatacccatgtcaataaccactggagccaaagcacagatgacaactctaagggtagagttgacaggcaggacgtcttttgaaccgtcaacgtcaaatgagtatttagtaacaccagtttgagcattaataaaggtgtaggcgacgaaaagaccagcggtatagataagagttgggatgaagtcagcaaacaagatattggatctgtgagccctcgaagcgtcaccagcatccttttcagacacgtcaccagttaatttacgcttgaaaccggtaacacgcgatcttgaaagtctgacatatccaatccacgagtttctgtgccacttggtgttacctctcgacaaccatctaatgaagtcacggtagtcaatgaagaagtcttcccaggcgaattgatgggggttgaatacaaatggcgagaacatcaaagaagacaatgaggcccagaaccataacaatggaacctgccagtgtgcaacagagccaaacaacaagatcaacatcaatctggcacccatatagatggaagagtcagcgaaacgagagtacaaaatcgagaatggaattctggaagttgcaaaccctctacctgtagaaatatacctagcaccacctacagtcaaatcagtgaaaaccgaggaagagtagatttgggcaacgaagacttcgaacattggtgacaatgagataaagtggcgaacgaatctttggaatgccttccagacacctctttcgatcaattcttgcacaaccaaaggaatgaaggaaatgaaaaagacaatgaaaattgacaatgtataacgtctggtccagtcaacagctggagacaagttgtaacagccgaatgggaacatgatgtcggtgataggagagtctctgttgtagtaacatatgatcgattcgtgggccaaagaactcaagttggccaataccaaaatgaaaacttgcaaagacaactgaatgaaaagattgttaatgtggaaacctggatgtccatagtaaaatgacaagaaccggtccaatggcaactgagtagataaatagtaatattctctcgacaacatctgttcacccataccagcaccaatcttggtggtgaaattcaagatggatccgaaacccatatctctacctttaccacactggtagtactcacagtgcttgatcttaccacctctcaacatggcagtcataccagcgtagatatcttcgttcaaatgcaaacccttttgggccttcgaaacaccacctctggtaaacatgaaggtagcattcaagaaatcaggatgaccataatgcaatttaccaccaatctgagccaaggttctggcgaacaaagtaccgaaagtctgttccttaccagcagcaacatcacctaacacacctgagttctcggagaaaatgtactctctagcacccaatatggctacggggtccttcttcttggattcgtcggacttcaagttgggagcgtatgggtttacgtactctacattcaattcttcgaactcggccaaaacagatctgatcttcaaacactcttccaagtagttgtcctggttagcatcgatcaactgaatgtactcacctctgtggaagatgattgcgtgattctggttatcagatttaccgtcacccaagataggattaccagacaattgcactctaaacttagggcgtcttctgccgttttccaacatctcacagtggccgtccatcaaagcggagtacactcttggttcttcttcttcgttcaaaggaggctcctcgtccaagtaggcgatttgcaagtcgggataagcacgcaacaaaaattcagcattttccatttcatcgtccttgaacttggacaatctttgcatcgaaaccaagaatctaaactttcttctggccatcttttccaaagctaactctaaaccttctggatctcctccaaagtattgtactaactctggattttccactctgtacaataacttgattgctctggcgtagttcatgaaaccagaaacagttctgtacaatgtttgcgatctcaatgaggcccagattctagttctcaaggtatattccggagcagcagacttgaaaccaatacaataaaatggcaagtcgtcaatcttggacttcaaaccattttcagacaacttctcagcgtcatccccattttcataagcagctgtttcttccgccaatatctttgtatcattgacaaaacactcccattcgacaggatgtaactgtttcaagtattccaataaggtaactctcgagtactggtcgtcttctctgatgatttctcttaaagacaacaagatcttttccgaatagtgaggtgtgaaaactgtaaaacttggcatgttgtcgactggcaaaggttcagggataggagtagccaacgactgggcaaagaacgaaattcttctttcggcttcagagttacgaggaaagaattctgtctcaaagttgttgtcatcctgactgacaaagaaagtaggagctctcaaggttctcttgccttcaatttcagaaggaacctggtggtacaataacttctggacatgatctatagctaacaagtgctctctgtacatggaaataacaatagcattccaaatctgcgagatcaacaccttaggcttgtacttaatttccatctctgtagtggccaagatcttcgagtagattctcttgggcaatctggtgaagatatttctccaaggagtcaagatggaaatacccaagtagaaggaacgaccaatggaaaaaacacagttacagatgatgtaccacatgtaggtatccaagaagaataataataagtctacgagatacatcaagcccaagacaatcttagcctggtgtttgcacaacttgtccttgaaccagacttcaccagtacatctcatggtcatggtagataagattctgatagggtctctcaacgacaaggtcaagaagaaatacgattcaagcaactttgcaaggaataccaatacccataacaagtaagacatccacatgtccaagcctctcaatttaatgaagttggcagtgaaagcttgcgaagacaaatatcttctggatcttttgttcatgtaggaggtgaacaatcctcctaatggcataacagcgaaaaataccaaggtagcaatggcaatgaaaaagcccacaatcgacaaaacatgagcagtctttgaaattgcagataaaccagcccagtagaaggtgaacacaacaggagccaagttgagaaagaagatcaaaagcaaaaacaacaaacgacgagtcaaatgttgagcaccggcccattccctagggacaaacatccattcgaagatggtagcaagaatctggatagccgaagcaataacacctccaatagcagcagcagcccatctggaagaagctgttggttgtgggtctttggtttgaatgtagtgttgagtgtataatgtaggcgagttgtaggcagtgtacatccagtagacggttccgtgtataatccagattctgttgaagttagtgacgaaatgcaaccaggttctgatttctttataggtcttgaagaagacattgctccattcgacttcgcccaacttcaagtaacgttcttcctgaggaatatctaccaatctcgtaccatcttcaaacatgattctggaaataccttcagggtaccagaacaactggttgacgtcatcgtagccaataattttgttgtggtccttttcacgctttacgaatctaccttcgtagatttcataaacttgcgatctgaggaaacggtacaaaggagtaatgacacggttcaagtagtcaccctctggtactggttcctgtctctgttggcaggctggtgacaacaagtagtccttagctgtcttgtagatgtaacacaaggtttctggagtaaaacgaacctggttagcttcaccccacaataacaaataaagcgaaatgtcacggactctttcttctggactcaatgagttcatcttggccttccatctgatctcagcagcttctaaagaatagtcgccttccaactcgttggccaaggcgtcgatatcttcaccgtgttcttcagcagcctttctggccttcttggactttttagaagcctttctggcctttttgccgattttacccaaattcatgttggcaaaaccaagcgaatcgtccaagtcctgttgcgaggcgaagaaccactttctgtagttggcgttttccccaccgatataatcggcatgcaaactcaaaagagcctgtgctggcgacatacgcgaagatctcgagtccaagagcgtcatgaaatagtcaaacatgtttctcatagaatctctctggaacccaaacttgttggtcaagtcaatgaagatatcttcaatgtgctcaaccttgattggagcctgtgggtcagctgaccaggcaggataaggcaagttcgacgacatctgaaactgtgttggatcatagccttgaccctggccgccgtatataggtgtggaggcaccagacgatcttgggtcaccgccatagctcatctgagaaggcgtatattgagttccatattggtcgtagccaggagtgcctggggtttgaccaccatagctgaaatcagaaaaggcttctggatcagcattgtagcctccctgaggatgcattggctggccgccatatggagctccgttaggatcctggtagccttccatgtcatatggctgctgatggtactgagagtttggatcatagaaatcctgctgttgctgaccttcatcgtagggctgttgttggtagtatccgtcaccagcaggagcgccctgctggttgggatcataataattatgattattatcgctatacgacatctgaaaaaagggttagtactgaaaaatgagaaaaatcaaggaaatggtgaaagtttcagtttgtttctgttagattagataaatatctgagacaagcgaaggaatgaggtcagattagacaaaaaagcgaacgtggcagcagaaattgtagtaatagtagcagctgaatagagctaacgataaagctagtaggatatagccagaatggtactggattgatatctatggtgctttatcagctagaactggcgcagaacacttcgtctttattaccagtgtcagactcaagttcaagactaaggaaagaaaaacagcagtggcacttaatcaaaaaattcacacgatttctaaatgatatttatgaaaaagtctcgagtgtgaagtgtgattttgtgtctgatttgagcgatgttctctccgaaattgtctgtctcatttcagtaaagtcgtttgctaaacgggactaaaaaataaagcagaacacgaaaaagaaattcgcccaccaccgcgccgcgggataaaaatagaccgacgtaatcctcaggctgctcggtgtaaatcagggcccattcacttctcgccgaccagaacgtccatcactttcaacgggaatttcactgatatttgactagcttctagattccggtttctgctaatacttggcaagaactgggaacactgctagtcatcagtagctacatccttcggcttcgatgtctgctctccggcgctgaaatctgtgtaaaaaactggtcgtgcgtcgcacaaagttaccacaatctttacttacacgagtgatgagcttatctgtgccggttttgatccgaagaaaaagtagccgagtcttccctgtccgaggaatggcaagccactggcgtccgctatctgttcgttgtcgctgtttgatactggcagcacaaactcacattctcgaacgaatctcatcggctgccggccggcagctgcaatccctcgagtgctcacgtgacgattgttcctattgtcaattttaggtcgtttcagggtaatcgtgcgccgaccagatcaagtcgagacgcctgttcgggctgtgtcctgtctgcaggaggcccattgatttacgccaaaagacaccaactcacagaaagacaaaaacacatggacacggtctgattggatggctacacggccctaagcatagaaattgatggagacaaaaggacttcaagatctgcagtatgtgtgagaggaaacagagttcttttcgggcgagaaacgggattctggagacatttcacgggaaaattgaagttctcagcagcctagcggcggattttgttcgcgttttggggaaactgaaactgggtagagggtgggatacataccttaatctataattgctattcgacgatgtagcacaacgataatgatggccaacagtgaagaacagaagaaaaagacttgacaatcaaaagttttgaaaatgaaaatccgacacaactgtcagaattctcaggggacacaatgtgtttggtatttattgaagctgggattgggtgcacctgcatgtatggcgcgccgacagaagaaaatttttggagcgacacgagaacgcgactatgaaaaccagaagttgcagcggcggtctgcaggcggtgtgttttgaggtataattatagatatccggatgtggcaggggctgggtaaagcaggtgttgtgttggcaagataaggttggtgtattattaatggagcgctgtaggctgcgggtcggaagtggcaaatagagtaatgctaaataattgctacgaaaataacagatatttactggaataataggcaaaaatgggcttttcctttccaccaaaaagctatgcagaatgtgcagtgaaactggagacaattctatagcacaagttctacaaagagtttcttatccacgaaggctgtattgtatggcatgtacgagagatttttgtgtgcaagtgctggtctgatttgatatggtatggtatctactgctgtttcggaacaatcactatcaaatgtgattcatattcacatgtaccatgtacaaacgtccaaacttacaaacgtaccatgtacacattgtatattttgtagtgcttcaattcagtgcctaaactctagtctatttgcaaccatatattgatatgggctaactaagacaataccaatctttcgtactgtacttttgaatttcacactcattgtatacatttccacatctttcagtgcttctgaatctcaagctctgccgattattccagatccaaaaacccctggttaaatccgacaagttgtccgttacttgttggtattttcaaacgcgaacattcactttgttcgtttcagttccttcagcctcctctttcctggtctttgaaggtgataccacatcggcaatctcggtgtttccagctcttgacttgctcgcgttctcgcgtatgctcggtaaactcttcatccgtttcaactgctcttcctggggcttctcttggtgtgctgatgatcactagtatagacgtattttctgcaacgctgcctgtattcagtttttccctttactaaaagcccagaattcccataccacctgtatttctttctggttctttctctatatagcactatcgctacaattctacagctacaggctcactttcttccaacttccttatcactgttacttctagtatagctgctactatcacactgactaagctcaggggccccttctcctgcctcccttccctaccaggactcaaacgcgactttagctcctgtcacagactgcagcatcaacatctatatcgtccggtcttctcctcgcaaccgtctcctgcataacgcgcgacattctcatgctcctgttctgtttccatacattgcgccaatgtcgctgaatttgcccattactatgcccttttagggcgtgtctcatctcatcacaggaggaagatctctgccgcagtaccagatcaaatcccaaatttttcactcatcccgaagcttccatattttcaactcttttgttgagatcctttctggcgagtactcttcatttttggtcgaatttcctttactttcgttcggctttagtgttacttgtgaacgcctaatacagacgtctcccgttttggaagcttttcatgtagcattaactgatatatgtgctgggttttctgtatacttcacggtagattattgtaatgtagttaacttgacttttatcatatattgtggagtggcaatactcaagattttacaatgcgccgtagtggtacatctctatagttctagtcccattttacaggagacatttctactctgttatattttgaattgtggtctggacacctgcaatgctacattatttatatagatggtagagtgtagtagactgaggtcgcctaatcgttccagcccaatgcactcaactcctttctgatgtcgtcctccttgttgattttgctgacctgggtgtcttccaaaggttcgccgctggcctgcttcatcttcaaggtctcgatggctctcaacttcttcaacaacgatctgattttcttctcttccaacagcgcaactccgccaacaacaacacctccctgagaggaagtagctgcaacagccggagccactggtgagggagtagctggagcagctggagtagaagctggggcagaagctggggcagacgataattggccaagtcctggtggtggacccaaaggagcagcagatggtgcaggagagccttctatagagggagagtcttccttcaggttcttcttagcttctctcttctttctgtttttttgagctgtcttggattccttgatctctacagggttggctcctggaacaacacgggctctgccactactagggttgattccattacgctgctgttgttgtaacttcaagttgttttgaagctccttctggtacaaggaagtagctgtgcttggagcagaactgcccctggcatgaggaggacggtatgcaccagcaggcttggaagcagcagtagctgaagcagcagctttcttggcgatgtattcacgtgccgagtcatgggctggtggagcaggctccaattgcttcaaaggaggaaactcagcgatagtctgaggcttccatccaattgcatacaactcttggtactctttcaagtaaaccaattgaccagatgcatgccacaccttcaagccgttatccacacgtaaacgaggagaagtcgttgcagtcaagatgtaacgtccacaaggtgaccattcgcacacagaagtgttggcagcttcaaaggttacgactttactgaacttgttctgacgatcgtatacatctacagttccctgcaaattgccgaaaccggcaaccaacacgtaacgagcgtgaggagaatacaagatggtgttacgtggagctgtaggtaacgagtggatagcgttaccacgagcatcaaagaaagtcgtttctgatggcatgtaaccgtagataacagcaaactctctggcagaaggagaccaggtgatgtcgtgaatgggtccttctctcttcaagtcgattctggaatcatatgaaccggcaattcccaagaggtacaagttggtttcgccgtagtacgacttgttactggtatcgtggtcggtagaggccaatgctaacaatgctgtacccaacgagttccacttcaattgacaccgttcagccttgaagaagttcttgctacaggtgggttggttgaagtttggaacgttatagatcaacaccgaggctggtttgccactagcttctggtatgaagatagcaacagaggggtttaaacctggtgaaatctggaagttctggaacggctgtttggcatcagccactttgtacttgtgggtaggctggtttatatttatggtttcctgcagagacgtgctgatgtcaaagaaatggatttccttgttgttgaagtttttggctacgagtttctcgtcctgggtaaactggggcttccatccgctctggtgtttctgcagccattccactatcaaggacttggtcttcaagttgaaaatcttcaagttgttattccaggttccgttttcacggttgatttgaatgggtttgcaccataaacataagaacgttccttgtggtgaaaaatatatatcaaacacctcgggcaactcgatcttgtggtacaactcagccttactcttagtattcaatactatcacctcgttgggctgggtgtaagcaaagaatgctccattgggcgagtacaaggccgaacggcattcttccgccgctttgggagacggcgtgatttcctcgtagtcatgtgtcaattctatcgaccgtggtagacgacctggcaggttagtataagatgttaagtatgaagagtatgagaatgagagaaaatgagaattattttcaaaaatttcgtaatattgatgaaattgttgatttcgtagatctgtagatttggcatattctgtggattctgtacattctgaggattttgtagatgtttgtagaatgaatttattgaaattcaaaagttcataattcttgtacgcgaatactcaaatgattttcagatgcatttacagatttcagatgagagatgagattcactaacagtggcaatgccattatctggatatcagcattatcggtattatcctctatactcgtagtcatataccctcaatcttaacaatgtctgtctccgggtagagatctggaatagtttcatgacaaaaattctcttctccagaatttccagaaatttcagaatcaaatcaaccaaatcagccgtactacgctgatctcaattctctttaattctcactagtcaggcttcttgccattccctctttcaaagtcagatacatacagaagaactcggtggacttggacatggtattgtttgctttatgcttttacttgtgatcgggaatcctatctggttgtgaattttctacggactccagtagtagacgaactaagtgaataatcgacggaaatcagctggagaagtggcttacaaggacgaaatcggctattaaagatagcaatcacacagttgggtttgttagtcccgtttcgacacttgttgtggaagaatagtcctgtcacaaggtctttttcggcactggcaaaagaagtagaaacggtcttcttccaaaaagacgtccactaccagcaggaaacttttgtggtcgtgcgctgctcggaaagcaggtgtgtgtgggagaaaaagtgccagggtcttgattttgcctgaagaaaggtatggtagagtaatgacaaataaggaaattgtattgaagtggtggaaatataagatcataagtgtgttgaaataaagaagtggattcagtttgtatatttggatcaaacttataaaagagtttttttttttggtattttttttacattttttacgaaaattttgcaatcattaattccacactccagaattctacaccagggctagaaatttacaactcagccaaaatccatactccgtaggtatactcaaactttttatttgaacaatattaatataaaagaaagcataactatagatttttctttgtcaaaatgcctctttcttatttgtgattcaccacaagtcaatttttagttatctactgtagtaatgctagtaatgtagccaccctcactttacctctccaaagttataatgccccgtctcctccgcatgcttactggcgcccgtttcccccaccaagatctcgtagcagttcaagcaacgcacccggaacgtcgtagtgttggtcagatagttgcgcgattgcaaaagtttacacaatttatggctggcttctagaacagcagactcttccttacctccacaactccaggaggtgatgtcattggctttgtcaccatccaggaccgacaacgtgctattgacggccactacgtcgtaatgcactccactgtagattaatatgataaatttgtcaggttgcggaccctgctctttttcaaacgttatgaagttccccagctcgatatccaagcaattgatgcggattccaaaccagtccgccaagattcccaactcgatagcacctccccacgaatccttcttgatgatacatttacagtaatcctcgggcagccgccccaaaattgcttcgttatatagttctggcagattctggatatacgatacaattacagaacgcaactccagcggcggactaaatgtttcataggagctgtaaccactgagagcatacgaaatagagttgaacatacatgagttatcatcgggaatattacgaagaatgaggtatttatcctgttgcggaatatataccgaaggtatctctgtttctgagacagtttcagaagcttgtgttggttttgcagatggaattgcatcactggcaggtgtgtttcctcgagatacgggagatgcagatatacccagctctttggggttctcatcattttcggtttttgcaaccatttcgccaaattcaaccaagagctgatctccatctctgatctccgattcagccaacaacttcgaggtagaagttaagtctacagacttaggaggaaaacccgttttgattccggttaaaatatggctttctatttcctttagctccagcatgctgttaatggtgtctaggaactgaccaagtgtctctgccagatctggtgctactgtcttgacagctttgttagacttcaatcttaatctcatgatttgtcataaagccatagagaagagaacgtaaatgtcagattgaaaattgaaagtgctcaaacaaattgcaaaaaagccaaaatttctagattgtattactaacgcaaagtattatagagccggctatgttccccgatatggagtatctgttaatggcgttaatggtagataatggtcgagattggtttcaccttgtcaaattcaagatctctaccctgcacactacctcttgcgtcttgtcgcaagatcagtttgcgacatacatgcgacaatacgtctaagataatctgatccatgctaaatgaacgtatactaaatgctgcttgctataccttatatatgtcccatatgaatctcatagaagtctcatatatgtcttaagtagtaccatatgctttggcgatgctagtgaaatgaaaagaaactattgtacaatgaggaaatgaagactctgaattagtgaaaaatcgcattggatagtggaaaagtcacttgaaacctctgaaacttttgcttatagaaactggaattgctactctaatcggtcatttcgacttcgggtctttctggctgttgttgattctgttgttgctgttgttgaaattcctctgaagggactcccgttattatagcatccaaagtgtctttcttctggccaagagcgtcggcaaactcttccttgttttccgatttgtactgttccaactgcttatacttttctactgactccatgaacttcaacatgttcactccggcagcagcctcggcttctaaaggtgtatatggcttcttctttaactccctgactcttctcttgtgtacttttcctttgttgtgacggtccaaactcaattggttctcgaagtatttcgcacattccacacagtagtactggcccaatcctggtttggtctcatctaatggctggtttttgagcttgtgaatagactctttagaggccatatcatcgtagataagatcaagatctctcgttcttctctttgtcttatatctcttcacactgtatcttcccatgttgtctggagtatttagggtgtgcttccttacaaacttgtcaatttgttgtgaaacatcgaaatcatagctctaaattagtgaaattttaatttttttattaaaggcgatggagcagagatggcgcgtgatcaagaccatgtgattcttggcagatgatcggagcacacgacacatatcacatgataacgccactcttctttctcatttctattattcgcatccttcgcatttcaaactcatctccctcaatctcttgagaaaaaaaacagtcacattgcacgtgatcataaattcaccatgaccgacatagatgtcggctagaatgagcatcacgtgaccactccatcagcttactaagtatgtctcccatagtttagctccatagtgtgcgtttctgtctgcagtcaccatgctcacttttttcagttccatagaaaagaagatttttctctctttttctaatacagttttttcccctactaaccaagtgttaataaaggtatgtaacctaaagatgagcatgaaggagcccaaaacgatgtagatgactcgagctactacgaccaaacagccctggttttcccagagacatttccgttgattttcgaacgaataaagaccatattggaggccttccagattgatttgtcatctccaattttcagtagaggaagtataaaaggagacgtacaaccacatttatttgtcctcagtcttttcccaagagatcatcagagtagcctatcgtttccaaacgtgtgtagattgcctggagtaaatttcagttcgttttggcgttcctacgttgtgctttgtttccattagtaagcattatatactaacataatttcagacaagatggctagaagaccagctagatgttacagatactgtaagaacaagccttacccaaagtccagatacaacagagctgtcccagacgctaagatcagaatctacgatttgggtagaaagaaggctcaagtcgatgaattcccattgtgtgtccacttggtttctaacgaattagaacaattgtcctcggaagctttggaagctgcccgtatctgtgccaacaagtatatcaccaaggtttctggtagagattctttccacttgagagtcagagtccacccattccacgtcttgagaatcaacaagatgttgtcgtgtgccggtgccgatagattgcaacaaggtatgagaggtgcttggggtaagccacatggtcttgctgccagagtctctattggtcaaattatcatgtcctgtagaaccaaggactccaacaaggaagtcgttattgaaggtttgagaagagccagatacaagttcccaggtcaacaaaagatcattatttctaagaagtggggtttcactcctttgaacagagacgaatacgttgctaagaagcaaaacggtgaagtcaaggatgatggtgcttacgtcaagttcttgtccagaaagggtaacttagaagccaacttgagacagttcccagactaccaataccaagcttaaatgcggttgattcccatcaaaagtatttactgttgctattgtagctgatattgtcaatttttgtacattttaataacacaccttgcttaagaataattgtagtgaagataacatcttagggaagtttagtagcgacactgacttattttgtttagtaagatttgttgacctcttttgtatatattacagagatgtggtggcgagtagagaaggcagatttgagagctcccgaaagatatggaccatactgttgatagtgcttactctgacagagtgtagcacaagatagaatatgttcttctcctcaatacctctatatcagttgatgctgaagcttgctattaccatactgtttcaaccttgagttgcatctttatgtgaaactcaagaacattctttgatcttttgaagagactgctcagattctgtaagcgagatgaaacttcaagtaagcagaagcggaacatcaaaataatctaaaataaggatctcaaacatgaagcaacttacagggaagtaaatacaaggtcttacatcatatacgatacaactttgtctttctaagtctagttactaccaagaacatttgggtgcaaaatcctagaacatatagttagataagcttgtacctccctcaaaatcagtgcctgaaaagtcagtaaaattctgcaaatcccaacggaagtcttctagtgtctacaaaccaaatacgatatccacaaccatcatcttacaccttggaatctggctatcatctcttgtgttttgggatctgattttcccattgtctgtctgccgcaccacgatggaaaaatgtgttcccaatccggaaaagtgagacagacagaagaagacacctgttcaccacaacagccagccaaccgtatttttcaacaaaaacgaccaggctcaccagccacaggcgtccaagcaagatacgtgtccaaaacacacagaatccgaatcaaaaacacttctataattgtaattgctcagcctttcatttagttatttcggacaattaaacttgtgtctgacatccacagcactgagcctcaaaaaatatacacggtgtcgatgaaattttcgcatctgaatgcaggaggcagataaagctttcggacaattttcgttcagactactataaatacaaacacgaacagacatgtgttcacttttttctagagtgaatttgaattgactttgatttttaacaaatctcacttcacagaccgctacccagtatatacacaaaatgtcatttgccagcaaggaaaacccaaagactttggtgttgtttgatgtcgatggaactttgactccagccagattgttcatttctgacgagatgaagagcactttggaaaagttgagaaagaaggttgttgttggcttcgttggaggctcggacttgaagaagcaagttgaacagttgggtccaaatgttttgcaagactttgactactgtttctctgaaaacggtttgactgcttacaagttaggtaaggaattggcttcgcagtctttcatcacctggatcggcgaagagaagtacaacaagttggccaagttcatcttgaagtacttgtctgagctcgaccttccaatcagaagaggtaccttcattgaattcagaaacggtatgatcaatgtctcccctatcggaagaaatgcttctacccaagaaagaaaagactacgaaaagtacgacaaggaacacaagattagagagaattttgttactgccttgaaggaaaacttcgcagactacggcttgacctactccatcggtggcgagatctcgttcgatgtcttcccaaccggttgggacaagacctactgtttgcaacatgttgctgacgagcacttcgaagaaatccacttctttggtgacaagtcctacaagggaggtaacgattacgagatctacgaagacaaaagaaccattggtcatgccgtcaactccccagctgacaccattagaatcttgaacgatatctttaaattgtaagctaaccctaaataccctaaattataatcaacatactcatagacaatatcagagtaaagtagagacagacagtaggactgccgtactaatatggaattctagaagttaggaattagtgcatgttatagatctgtaattcagactgtaaaagacattatgtacatatattaggtatgaagtgaagtagtatgacgaaagttaagatagattagatatggcgattggcatgatctctggcatgctcaataagatagattcactttctgaatctcaatacaagatagctgcccaatctatagacaaagataattgctatgagtactccaacccaaagacccttagagtagttggagtaacccaagttgtccaatacagcagtaccttgaaccatacattgatcagccaaaggagaatcgaacatacaatgacattgagaatcacagttaaagttacggttggagaattcgttgaacatcataccttggaacacatatctctggtagtcgatccagtagaaggtgtagtaccagaatttgttcaaaatgttggaaggaaccaagaaaccacccacagacatccataacccattggcaaacgcagtgagtgccaacgagatgacaaagttcgggaagatagaggcaataaagattgtcatggactcggctgctaccaagtccaagaacaaccacattagatagtagaagaaaccagtggcacttttgttgaagttgcacatgaagaaggttatgatgctaaacaccagagcaatgaggaaaaggaagggcaacccaataatgaaattagagactgtgaaagcaaaaggtccatacaaaccatttaaacgttcctttttatacgaatgatagtcttcaatgaaagatgggatataggcaacagacatgaaagacataaacgctccagagaagaagatagcattaataaatggctggatattcttctggccatttcccaaccttaaccaaacagtacccataagaatggctaagcccaagtacatgaaaagacgaacatagtaggtgaagatgtctcgtctggctttaatgagcaatcgctggagtaacacccgtgtgtttagaacttctttctgaaacgacgttgactgctggtatctttcgtcaataacatcgtctgatttcatctgctcaaaagcaccgaccgcttcgattggtgtcacatggctgttccatttgtcgacaagaatgctgaggacgtcctggcggtcgtcatcaatgactgaagacgagaagtcggtattgatcaagtccaatacaaactctgaagggttgatgtaggctggaatcaggaaaccgatcgactcgaagtatttcaccaatttgtccaccctgtcgttataaacagttttacctctggataaaaagaggactttgtcaaacaattcgaatgtgtatgttgaaggctggtgaatcgaacagataacagccatgttttcttcttcagcaacccgtttaatcatgctgaccacttctcttgaagctacagagtccaaaccagaggtaggttcatccaaaaacaaaatcgatgggtaagtgatgatctgcgaagcaatactgactcttctcttctgaccaccagaaatgcccttctgaatagggtttccaatcttgacatttttctggttctgtaaccccaataattctatagttctatctacggcctccttgcggtactggcccctgagttgggagaaacgagcagagaaatcgactgtttcttgcacagtcaacgaaccaatcaatgagtcttcctgttctacatagctggaaagctgtttcatcatggacaaactggcatgttcgccgttaacatatatatctccagtctgcacagccagtctggggttgtttctgtgggccaatatgtttaatagggttgtctttccggaaccagaaggacccataagggccataatttctccagcctggacttcgccactggcattatcgatcaaacagacagaattgtttttagacttgatttttagcgagacattgctccatctgaaggagtctactttagtatgcatcggaaatggctgcgaaatgatgtataattttgcagccgagataaccaccactaaaactgctgtggcgtatcacgtcagatgagatgatcaactgtggattttttctttttatagacagataacgacaaaccccgagggatttgacttcatatcatcacgtgatattatcaatgtgattggggataatggaattctacctggttccaaggtaccaagttaagaggcttacatgttaatagtacagtatggtgaatcctgtaagctttggtattgtgtctgcaaaagggaagtattggaaacttctggaggttcctacaacagattaaatcggtcacatttctgtctggtaggaaagagattcgttttgtgtactattttgcaaccattttttagtctacaatctctacattctgtagaggtatttcattaagaaactttcatttctgtttctacgttgctaatcgacaccataaaagttcaacttttccttgcagtttgcccgatctttataagaatttatttagaatgtagttcagctattcatatatacaatttatacacgtctgtagaagatggccgacgcttggtcaccagcaaccacaacctgttcaatagcagatccgttcggtaactgatggttgtgcaatatctgtaatcttccattgttgatatcattcaccttcgcagccaacttcttcttagaagcaaccttatcgttgccagaatctatgtcttgtggttccaccaacttgggcaattgcaccggtttggagctcttcacagccttaccattaccaaactgaccagcttcgttgtctccaaataccataacatctttgtacttaccttcgttttccaatgttacgaacgcatgatttgatccaatactaatatccttgatgccgatattggccacctggttacgttcttcactatattccgacaagttaagcaaggttttgatgatctgaggttgggcacagacgtgcaagtatctgttaccacccaattgacctttgagcccattgccaaaactcaaaagaatttgctgatccttagaagcatctactggatccaaatatttaagctgaatatatgaagtttcgctgccggcatcgaccttggttacagtaaagttgttggagtctacagccttgtcaactacgtttctggcgattctcttaaagtcttcagccgcaaatactctcttgggaatcggctggaagtcagtcctgtagttcatctcaattccacattctccataagagtttcttccccatgtccagatgttgttatgtgaatctgatgcgatactgtggtaggatccagcagcaatgctggtgaactttctggagtagacctgttttgaaccatccttgtttatgtggacctcatggttcaagtttgtcaactcgtagaccttgtcttctggaacctctttggattcggacaagggtgacaacaaaggcaatccatactggccgtagttctttccatttctatcagtactagccacatacaacttaccagattctccaagaagcaaaagatgtgactttccagttgagatttggcggatcttttctgtcaagtcaagcattttaaagttgttgacttgggaaatacctaaccagtttctagatttagaacctttgaactctacttctttatccactctaggcaaataggcaacttctcccttactggacaatacatagacgtacttgctagagatttggcacagagcagctttgaagggcaacttgcacaactttggctccttgagcgctggacaagactggaatacctggcctttctcatttactacaaccaacaaatctttagcaatcttgacatcagcaagcaattgaccatcgaagaagttgactctggagggaaacttcagcttattgtgagaaccaaacatgtaaagtcctgcctcactatgtgaatctttgagaccagaaaccatgtcgtcggtgatttcctcagtcattttatttacaaggtaattgatgtttttggtatttttagtaggatccttcatgtccttggctttagagtcttcgattttgtatgtgatatcggcaagtaaggaggttttcacatattctcggttcatgaagagccgatgtcctcctatgattatgatcaaggctcctattcctatacctacacctttcattctctccgtaaactcaaacttctttctctgttccttctggcgcttctggaagtcctgatggacaatatgaagctgttccttgtattcgggacttcctggcttgagattggccaaacggggatcgctttcaatgatggcattgatatcgttagattcgtctgcatcttcgttctggaatcttctgtcgattttcagatggtatttagatgagttatgttcttcttcaaatttggggttgatttcggagtcgatttcatccaaacttttgaagttgtcgccaaaccggtagtgggtcttgcttttgttgaactcttcgatggagttgaacttcttctgattctgggagtatagcctgaaaaaagcaagatattttgaattcgacagagcacgagcacagtgtcgagctataaggctcgtagacctatacatgcttgctattgctgtatgaaatgctggaaaaagctggaagagggagttggttgaaaatagagaatgacttgagtgaaaaattatgtatgcgaaataattttaactaggggaagccagaagagacgtatgaaatgtgagacaaagagcaagacgtttgaaacaaaaggattttcaagagatatatgatatttatgaaagttgacaaggtctactaaacctttttccgaatggccccgtctgtcttgatcacttaggaaatgtgcttactattggagattgactattggagcttaactatagatgcgagaaacccaccaaaaaatgcgaattggatattttaattccttcaagaaaactgagactaacaactaccgggtttctgccagagtccaataacatttctgactaatttatagcatcagccaataccgtatccatctaccatagggttcaactttctgataaaaccataactaacctaattctcactatactctaaatgcaatctatcatgttcagacaattgcctggccagacattgagatctgtgaggtttactcaaccagtcagatgtttgtcttcgatcaccaagttcgacaccaagaagtttgtccaatcgctacagaccagaggaggattcacccagcaacaggctgaaactgcagttagcatagttagcagagccataaatgacgggatctattcgataaccaacaatttgataacaaaagaaacactttcatccacagcttaccagcagaaagtagattttgccaaattaaagggtgaactccagacgatggacaaatcggagttcactaacttgaaaaaagaacaggagaacctacgcacggacttgaccaatttgaaaaacagattgaaagaggaaatgacaagaaatctggctggggtcaggttggatttgaatttggaaaagggaagaatcagagaggaatcttcgatccacgaactgaagattgaggatacgtatacacgaatcgacgaggagattgccaacatgcaaatgcagatcaagtcggtcaagactcaagtcatgcaatggttgattggtgtttcttctggtacatttgcgcttttgttggcattcatcagattctttggatagaggcaacccaaatgctactgatatgttctacttgttacagaaactacgatctggtcctcgatgtagtcaagatattgttgtgctaatgagatatcaatctagagccagatacaaacttaatctctgaacatcctactaaggtgtttgctattcatattacctctgttcttgttgattctacaatgtctacgaccgcaagagattgagatgagaactgaagctctcaatcttcatcaaagcctccattaacaggatacttgctcttcttgaggaaccttagtatgtcagtgaaatgtacgaatcctgcacacggtcaagcataaactcacctaaatatactgagagcaaagtagtagcgcactggtcggtttctttcatctcagaaggggacttcaatttccaccttcctgttcagtttccatattgacttacttcctcgcttctccattccagccaatggctccagcccgtctatttgcacccagctgacgtgtctcgattgtgctgattatggaacgcgcttttgtgtgcaggttcgctcaatatttttgatagaccagaatcatcattgatttttcaactcactctacttgtgtgtttcctcaggaaagcgtcacaaaggagcagcaaatgaactcaatctataatcacggtctcaaacagactcagactattagcaatgacttgcttgagtttgaaaagaacttgtcgacgtctcctctttctctccaaggagccattaccacttccatcacagcatttcgtaaaaccatacgggaataccaggatttgatagaaaaagacacagactcttctgccaatacgaaacacgaaagtcggcttgagaagttcaatctggatttgaacgacttttccgctaaatttgagtctctcagagcccaaagagatgtattagttcaagaaactaacaagcaggagttgctaggtagaagacatcattctgctgcgaacggaatgccagcctccgacaacccatatgatcctagcgggcgcgtggaagccgaacagcaacagcagactctaaactacctggaagggttgttcaaggaaaggctgtcgttggctcgtggatctcagcaattagaccatattcttgaaatgggccagaatgctttcgaagacattgtagaacagaacgaggtgttgcgcaaagtgcaggctaagtttgaggaaggactagtgacattgggagtgagtcagggcaccatccgtagtgtagaaagaagagccaagcaggataagtggttgttctggttttgtgtggtggtgatggtagtgattttctactatatagtgaaattcttccgctgaagaggtccccacagtaaccgcatttgaggttgaaaccatgggacgtatatcttttagttgatttgttccttcagaactgtgtaacgttatttaatatagttttctcaactggactatcaatttcctaatcggtgttcggttgcaaagcaatcttggggaagacagcttggcctgcggagagtagcgacatagtacgaaaggcatgtgagagactcttgcctattggcgaatctgagagacacctgctcattagtgctgaaatcgtagtttcagttatctagcgagcaagttgttgctgaagccatatgcttaaattgttttgtatatagcagcactccttgaaagctcattttgtattggccctattttgagcccgtaccatcgacgtattgattccataatccataatccatattccatacctaatattaatactatttatttattctttagtttgcaataagtcttattcgactcgatattttacactatacttgttctatttccattcgcttatgctagcctatggaatactgacaccagtttagtttaataactcaaatatttgagtcaccaaacgtatacccccttgcaatatccacaatccactcctcagagtttcattgccagtactaattagatctaccccacgaactggaaggaaaacgcaatgtgtcaagccatttaagtttagtcttctaggataacccaaatgggtaaaagaattcaaaatctactctatgaaccaatctggccgcacatctcatgattcccaggttcatccctttcggagatctcgggaaggttgtattctgacactggaatagagtgggagcaatgaaagggctcagcccttgaagttggctttggatgggttggaaacatggtttcttaacaatggcccatttcgcacccaaattcctgagaccatttccaggaatgggtaataccagaagacaagaaatacaagcctcgaggtatcaccacttctgagtgagagtagtaagctgataccccatggttggaggcttgtctggctttcaagcccgtacgaattagagtagttactttttgaagcttttgttgaaccactcaaagctaagcattccatctgctttgtcacttttacaccaaaaaggctacattattctagactgtgatgctaaatgccccactttattgaaaatggccatctgtctatacccaaagcagcaagatttcgccagatctctctcgactagttttctttgttggaaatggactagatgcaaaaatctcctaattaggcaatctcgaggttccagacctgcatataccaccagttgcaaaactcggaactgactccattaggaaatgttatatccaataggtcaagttctcttgcgctaataggctggatcttgtattaaattgctgctagaggtcagcgacttgcatctctattatatatggagacgaaatcgcagtcggtggaagtggaaaatcctttttcttcacttttgtaaacaacctctcagtataccatcagcttgcctttcgccctatatttgcaaccggagtctaggcattggatcgtctctctccttcaaccaaatcctttgcaactcctttatcgcaataccgatctcatcaaaatcacttcaaaagaacttagacaaccactttcatttgcttgagtaaagcctatttattatacccctagagttataccaccgatgaagttatccaacttattgttgtttaccctattatcgggaacgatggtttctgcagctcctcccatggacttcaggaaaagagcatatgtcacggttgtgaccaccgtcgacgtagcagctccagcagctactaacaatgccatttgggatttgtttgatgatccagctaccccagttgcagatcctgctgcagctcctaccacggctgtagctccagtagttgttccaactccagctgtagcagccccagtggtgccatctccagttgcagcggcccccgtagttgcggcccccgttgcagctcccgttgcggctcccgttgcagctcccgttgcagctcccgttgcagctccagctcccgttgcagcagccccagtggcaactcctgctgcctctacttccataagcggaggcttccttagtggagtaggaaaggcattagggagtgcattgctgtcattttttggtggagacgactcagtttcctctcctatcagttctgctccagctgtagctgcaacagcatcaactccagtcgctgctccagtcgcagcagctccagtagtagcagctccatctacatctactgctgcgagcggtgatttcagtggaaagtcattgtttgacttcttatttggttccgggagcggtagttctgtctccagtggatcttcttctgttgtcggcgcagcttctatcagcgggactcccacttccccaagttccatagtggcccccgctaaccaagcaggtcttcctttgtcagtagtcggatccttctctgtttcgttgcccacaggaactggaacagtcaacggaggtagtattagtgctgccgatggttccttgggaatcacatactctccatacacaaagtcagatgcttgcaagtcagccctggaagtcgcttcagacattgctaagttatccaacttcaaaatcatcagattatattccactgactgttctggaattgagaacgtcttggctgctatcaacagcaaccaacaggttttcttaggaatctggggtattgactccggttctgttaccagcggattgcaagacattaccacagctgttgagggctcttctcgtggatggggtgctgttcataccattgctattggtaacgaaagagtcaacgatggagcagctactccttccgatatccaaagtgctatcaacactgccaaatcatggctcaaaagcaatggttccggatacacaggtccaattgtttccgtggacacattggtagctgttgtcagcaacccatcattgtgtagctattctgactacattgctgtcaactctcacccatactgggacggaggagttcaaccaagcaactctggaccttggttggtagaccaaatcaacaacttgaagagtgtttgcggttctagcaaacccatcatgatcactgaaacagggtggcccaccaaaggagatacaaatggtgtttgcgtaccttcagtggctaaccaagaagcagctttacagagtattgtgctgactttgggaaaccaggtgattgccttcacaatgtacaatgactactggaaatcgccagggtctatgggtgttgagcaatactggggtattttcggtgaccccagtgaataggagaaaagtatagttgtatataccgtagtatttaatgccaataaaagaacagtaatgagagaacgtagagaccgcgaatttgggtgcaaaagtgaattaaggactgaaaaaaatcataggaatagccccaaaaaaatggatgaaaatgaagaattctacactgaatatgtatatgcataaatatttgagtagcaactggattcatagatatacatgttgtggtggtacgctgtagaagaatactctacaatgggtgcaaaatctcacattcagtacgccatagatcatgtgacttcgctcgcgcacgaaaatttgttcttgactgaaaaacaacaatactaaatcttgcttaacctggtagaatataactccatatattcacaaatacaactatctcgccatcatgttatccgatagagataggaagaagttgaacaacagattacagtcgttgtacgatcgtgtatataagatcgaggaccacggacatcccatagcaaccacttttcatactttacctcttcgtactggaacagactactataagattgtgaaaaatcctctttcactccacggagtaggccgcaaaatcaaaaattccaagtatgacgacggtcagcagtttgttgacgatctttcgcaggtctcttggaatgcgcgattgtacaacattcgcgagtccaaggtgtatcgtcatgctttgatcctcaagcagtttgtcttgactgtagttattcccaagctcaagaacgataaagctgtgcccaatagtaaaacgatagcgtatcccgttttgggcgatttgcccgatgaaaaagatgaagctaaagtcgatgatattgatgttgtagaagctattgaacagcctaagctagagtctgtgagtatagttcagtatgaaaccactcctcaggcagagccagcatattctggctctggagggagacccacgccgccgcttgactaccaacaacaacagcagtatcagcagcagtatcaacagagcttcagctccactggcagcattggattactgtcttcacatcagctttcaccacctccttttaaacagtctaaacatgtagagagtggtataagaagaggtcgtcctccaattatcgataagccgttcgagacacgtatcaagttgatcttaaagagcttcaagaagttgcgcgatcccaacaacgaatccagatcgttgacacagcactttgataagttgccagacaccaagacaaaccccctgtattaccacaccattacaaaccctattagtttgttcgaaattaaagtcaaagttcgtaccaggaaatacaccagcgttgatcaattcatccacgacttggacgtaatgttcctgaatttccaaatgttctaccagaacgatccatatagtgaagagtttattgacttccagaacttcaacagagaggcccatgcgattattcagcaggaaatcagcaagagtgaccaagacttgatggtgtcgctgacttccggtaatgatggtgtagttagatacccattggacacgttggaggtcaatggttactcgtacaagattggtgattgggtgttgatcgaaaacggaaatgaccccgaaaagccaaccgtgggacagattttccgtttgtggtccacagaagatggcaatagatactgtaatgtctgctggtactaccgccccgaacagacttgccatgttgccgatcgtttgttcttcttgaacgaagtctgcaagactggccagtatcgtgaccatttggtcaacgaaattgtaggaccctgttacgttatctttttaactcgttaccagaaaggagacttaccagacggagtcattcccgatggtgctccatggtttatctgtgaattcagatacaacgagtccaatcacgttttcaacaggatcagaacctggaaagcctgtttgcctgacgaagtcagagaccatccagaacagccgcttattcctttgaacgacacccgtaagttgattaagtacgagtcgcccatcaagtctttgttgcccaaagatgcctatattggtatgcctatacccgagccaactttgggtcaacctaaagctcctccattagttggactggtatatcttgcaccagcattcaaggaagatgacttgggacaatatgtcaccagtccaaatgtagcgccgatgcccgaactcgacgagactgccagcggtcgccgtgccttcttgttcacacctatttctcaattgaaaggtggagggggtgccacaaccacagtatatactaccggtggaattgctcttccatctgtggaaaccgcccaacctccagtggttgtgccagtagcaacagcagcttacagtgctcctattcctgttgtggttcccgaagaaaaaccgattcttccagggacctacaaactgttacaatcgcagattcaagagagccagtcgaaaaggcttcaggaacagcaattgcagcagctacaacaacagcagcaacaacaggtgtatggaagagtcagcacccctcctacaagcataacgccaactggtagcaacttccacacttccacttcgaactattcaacgttacttgcgggaggagtactttcctacgctttagacgatgttgaagggaagttggccgatttcacggtgttgaacaaaagaagaagaatcaaccataatagtaacaacgacacccacaccgaggtcgagctggtaattttctatcgtgcgcccccttacgtgataccaggaaaccgtatcatcaccaacaatgctactgagcttggccattcagcggcatacttggcttggaagttgaaccagagttgaaatgagaatgtgtaaagagtctgtataattagaatgtatttttattatggaaagaagagtgtattgataaatgatagctaggtatcttttacatagctactacaattctgaaattaaaccaatgtctattcttctattcacttgtgctctcaactgtatcttcttatcacatcccacaaatgcttatataccttccgttatgaatgcgatttgtggagaatttgtaaatttcatttcattctattctaccatggaacaactgcaccacatgtccaaacagctagtcgagttccaggagtacctcaagacatgtcgcaagatcgttgcgcttgtgggggcaggactatcagtgtcttccgggttaccgacttttcgaggttctcaaggcttatggaagaattttaacatgattgacttggctactccagatgcattctacattgacccaggattggtatggcaattctactcgtggcgaaggtataacgcccttcaagcaaaaccaaataagggccatttggccctaagtgcactttcgaatttggctacaaggaaggattctaatctcgagtatatcactattactcagaatgtagatggcttgctgagccgaagcggacatgctaaggagaacctctacgagatccacggctcattgttcaatttaaattgcaccagcttcatgtgcaactatgtagatagaaacaacctcaagcatccactcacaaaagctctagaaggcacagagtatgaatacgatagaaagaacagaaagagaagtttggaagaagacgattccagtcaccaagtggactatagcatatcaccgcagtttcgaccggttaaaaacattccagagctggaactcccgcagtgtccggtttgcaaggatgggtctttattacgacccggagtagtttggtttggcgagtctctcccactcaacgtaatgaactctgtagacaacttcatagagctgaacaactcggtggacttaatccttgttattggaactagtggaaccgtgtatccggcgaatagttatgtagacagagtcaaggtcaagggaggaaaagtggccattttcaataccgatatcgaagaggatatcttacagggaattgtcaaggatacgtgggggtttcgtggtgatgccgccgagttgctcccgatagcattaaagccagtcattggcgaagtatgaccttacgaaatttgcaatatacaacagataagaaaagaaaaccacacagtcgacaagagtgtagtggaaatgaagtgtatattagaagaacgaagtgaactatagtaaattattaataatgtcgaaactgagaatcataatgtcataatgaaaggcgaactataatcgatgttgcatagccaaattctatttgtgttcaacccttcccaagtggtgaaccccttcctgaatagttaatggttgacatggcaatgtaatgcagttacatatcctaccattcctttctttctaacgtgggaatggaggtgctggatctgaacttgatagggcgatagaatggattgcccaccagaacagggtatagttttcggttggcatcggttccgaatatactaggggtagaattggctcgcaattcccgggaagctcgccgcttatgaccttcaatggcatttttcttctgaagttgagaatatgtgtctatagaagcaattgtcaccgtaggcttcaatggcgccttcattgtgggagaagttgtgaacgatttgttgatcttatattttgtgatggatgatttcttcttgggcttaactagcgaatgcggtgagatcaactcatcttcttcgtcaacttcattgtcgtctagaattgaatggtcgagatcatcgccttttccatttactatttgtgttggtgaaatatccccgaaactaaattcggtgttgtccaataagggagatgccaaagccagttgcttactgaaagagtttctcattcgggggttgacgagttttgtgggagaaatgctaccatcgccgtcactctcgaggaatttgaatggttgacagctgaatggagtcgccaagctagcgaatagaaattgtttgtcgtcgaaaacagccagtgtttccacagagttgcctgatattaagtcattggtagggtccaagaatcggatgtcaagctcatctaaagtagcgtcgaagtcgataatattcattattggtggtgaatctcgagaactgtctaagtcgactggcccgaagcttgtatttatagatgcaaaaatgagtagttaattatagccaagagggacccagtactccgcttgtattataagattcgatgtctattaacaacactaagttcaggttggtgaccccactgattaaatcaaaaatcaaaacacaagtcagaaatcaaaacagaaatcaaaatcaaagtttaatcacaattgacaagtcaatactcaaaatgaatcacaattcacgaataacaattgccaaatcaaaaaagtggaccttgaccagaacagcaactgtcaacagagttagtcagcaccaccagctaatgactgattgcaacgatacaatagaaaaattatcaagaattacagtagatgcacgggaatgtaatcaaatatattaaaaaaatccagcaaacttctgcattgtcttaggtacaaatcatggctaacattggcgtggaatggaagttggagccacgataaccaatgaaaagttcctacctaatcttaactaataacccagaaaatacttacataaaagaataaaatagaacttgggttctaaacgttaaagacaatactgtcatcagatccggactgcagcatattagctaaaaagggttaaattcaagatatgtaacagaaaggaaatttcaactccttgcactaaaaggaatgcataaaaatatcaagccaaactatggcagcggggagaaagactgggattctggggcacaacggcaacactaaccggttgtggtttggggaggtttactttttagtttgttagaatagcgagaacgcagtgtttacgagtcgaaaatacagattttcttagttaatagaataagaaaaaccaccgaagaaggtcatacacattccactgcattcctatagtctgggaattaatccgatgtgttgttgttgaataatacaaaattaggctatctagaataaattcataactttagtattttaatttcaggcattggtgcagctagtaaaaatgcagcgataataagcacatgtcaaaagggtaatctttggacattgggatgcattatggctcctccaaacacgccaatggtagcgaggtaaactaacacaagatctattctgcaacccaacgaccataaaaatatagggatgaaacgatcctcgcaacaggagcagacaagacgaccgggcgagatgaccggcccatcttatcaggccatgctagcatgggtggcttctagagtagtcgtagatcacgacctaaaagggcataaatgaccttggcgtagtataaatcgaagtagtgaatttttgacaagaacaatcccgtagaatgggcgtagaataggttatttcttgtggctagcaatttcagccctgaaaatacctttcctgacaatcatgatcgtcgatggagtttctaccagtgcaacactaaaaaaagaactattccaaaccttatcagtgtagcccggcccgtggccgtcttcaaagatcgccaagtctaccttatagtcaatgggcccgaggtcattaatgtgttggttgcagccgagaaatagctccttatgtaattggaaaaataaagtacgagatattgttgcgaattcctctttcagatattatcccgaaacccttgaacatctaaaacaacgtgctgaaaaaatttcgacacactaggcgtctggttcaagtagagtatagaagggtccgaacacgaattttggttcagaattagggtgaagtattgctttatgggatttggcacatttgagtcgatttattgctacaaatcccccctgcagctaggtgctgaatttttccatttctggcagagattgcaaaaaatatatagcccgccacaagagcagaagagtcaacttcaggcagccggatatattccttgcactagaatagctgcagcggggcggtaaaggcgacagcattgttgtagacaatcttcttagttacagaaaaattatacgtgaagtaattaggcaagaatacactttcaggctatggcatgcaccataaacttccactaccaagactctggatcagagcaagaaatgtgccatctgtagcaagtaaatctacgaatcagtagaggaaaatctttgaagcaaaataattttcgaatcagtagcgagagaaatgtaagaatcaggtatagaaaaatacgaatcagcagaaagaaaatgtacagctggtagcttggtccaaagcaagtttaagctagaataccatataagagagtcttctacaacctcgatctacagaatacaagaattccacctcttaaataaaaatgtaactataatacgaagtacaatcggttagcactcatctctacctacgagccaagaacttttattgataatcaggtggttctcaataactctctatctacagcgtctctggcaacgcgctggggctcagtcagccttttgagtggaagcccagcttctaagttgccatctatcaacaactggttgatcaaccagagcttacgcttctgctttatggagacagaaagctgctttcccacgaccttgttaatcttagaggcagtgttgagctggctagtcaacttggcatggagcgacttcaactcggcaagatcatcgatgtcttctacatctggggtctctatagctgggtaacctgtcttcaacactcgtgctttcagtttgagcaatttgtgtaaagaattggaattgacgtccttgtgttttctacttgggctgtcgtggtgttgttgtctcttgacgagattaattgtcttgttgttatcgtcttcacccgtaagtaaatcttcgccatcatcttctgcaaaatagttttggtaccgtatggcggctatcttgtgctgggtgaaattgtaaggcaagttgaagaaaacatcggcagttatgctgcctccagcagtgagagttttcttactgtgtttgtgaaccgaaccatcatactcgtcttcgtcatcatctccatcttcttcctcgtcgtcatcgtcgtcgtcgtcgtcttcgtcttcttcttcttcttcttcatcttcatcttcataccctaccagatgaactcctccttccttcaagacgtccaagaacttctgagaataccaccatgggttcttgtactcataatcctcttcaactaagcggagatacatatcttcattgaattcatctagttcgagccagtcataagctacagctgacaaagttcctttggcatacttgtctctgatagagttcacagcgtcttttatagtgtgcaaatcatgaactcccttgacgtgcttggcaagagcatctgaccttgtaaagtgtttctcgcattcgggaataggacaaaaatacggtttctcaccggtgtgggttctacagtgggaaatgagagcgaaacgtgaaggttgttcaatgccaaaacgaggacagccttgccattggcaggtgtatctgataggagtcgttggtgtcaagtgtgccatatgggccaaatgatttgtgttgagatggtccactaatcccgtcaacaggggaaagatgtctacttcacagtcttgccatttacatgggaatcctggtttgtcttctgttgggagttcttcttctttttcagagagagacatttttgaaactcttattagactttacttgacgacttatttcaatttgttctcaattcgagttttgactgattcgaggcggctgaattgttgttttctccacgttgcgtctggagtcttgctattgtaggtatgtttatggaaaagatattggtacttcattatatatttggagaatcgaaagaaatcaattaatggagtcaatttttggttgtgcatacagaagtgcgagaatgaaaattgatactgaaaggagaaagtcggtaggaggaaagtatcagggtggaactacgggttagaaagtaagtggccatatatgtgtagaattctaaaaggttttcaatatgatacgaaacatgcaaattatacgccataaacgtgaattcttataattttcaaaaatcaatgctaattatttatacattaggctgcgaaaacaaatgaacttcgagaacaatggctgcgaaaatacaaaaaaactagattcacattacaattaaaacatctacaactatattgttttctcattaagtaatttattatcctctatctagactaagtcttcatcaaatctggcagcaggattggactcaataaagtccaataaaaccttgtggcccaacaattctctaatgttagacacaccgtacttgatcatagtaggtctttccaatgaaagaccccagccaagcactctcaagttcttgggcaagcccatggactccaacatctctggtctgaacataccggaattaccgatttcaacccacttgttcaagcctttgtggaatgcaaaaatttccaaagatggctcggtgtatgggttataggctgacttgaatctcaaaccatgaacacccatctttccaaagaagtcttccatgaaaccaatcaagtctcccaacgtgatgtcgtaaccggccaatacaccttcaatctgatggaactcagccaagtgtgtggcatctacggcttcgttacggaaaacacgatcgatggaaaagagtcttacgggttttggatcttcagccaacttgtgcaacatggcagaagaaatggcagtggtgtgggttcttaaaaccattctcaacgactcttcagccttccaagggtatctgtaaccgatagagccgaacttaccgtcctggtgtacagccttgatgttttcccaatactgtttgtcctgaggaggcttggctactgctgggtctttcaaatagaaagtgtcttgcaagtctctggctggatgctgttgtggcacaaagagagtgtcgaagttccagaatccggtttctacgtattggttagagggcatttccgtgaatcccatagagaagaaaatctgtctgaactcttccctgactttgttcaatggatgtaaggctccggaagtaggatacacaccttccgagttgaagttgtatggcttaaattcggcttctttccatgagctgttgatgatcatttcggacgtaatgtctgtttcgtaattggcgatagtcaaagcgaacttgggacccttttctaccttgaaactgatgattttggtcatgctaatcaactttctcttcttcaactcattcaactccttcttatcgtccaacgatccggtagctttaattgtctgcaattccttcaaaactacatcttctggcaatgtagataccttggctatcaacttttcgccatccttactcaaccacttgtttttgaaagctttaccctggccaactaaaccaatagggcctaacttctctttcaagccagaaatagtcaacccttccaaggccttcaatacttcgtctacaacttgcacttccggagtggcaccggcactgacatacgactcggcttcggctgtgagagcccacgaatcgacctcgatcttgttgaaagtgatcatttccttggaccacaatgaggtcaaattggaatgtaaagtgttggaatcatactgtgaaagagtcttttcttgcaacgtgttggcgatttcgcctgactcgtgcacgagcttcaacaactgcaattggatatcggacatttgcggctattcagcttgcggctggaacttgaacgagacttgtagctgtactttggcttgaacagttgagagtgataataggctcttgtccaaaatttttcgggtgctgcagattacgcgggccggtgtctgagcgtagagatgagcacgattaagtatgtgagtgagtaatagctgtgagtaataaatgtgggcagctgtcaatcgctcacgtgatacaacacgtgacacaatattataaaggcaatcgggatattaatatatagataaagtaagatatttgtaaacgagaaagaatatggagagattgagaagggagtgcgtagagagaagaggcagagtgtgtagcaatatcacaaatatcacaaatatcacaaatttcagaagtatctcctgaacaatataaagtatcggagatgtagatatagtagtggtacttaagatgagatgccgttcttttgtagagtcaatggcttcattactgattctagagaaaagtcgcgaggtgatggccacgttttctattaatagccccagtagcattccagttctatcttcttgatgaactatcttgctctagtagactccggtacgcagattgtggtctcgaaaatagacggcgatgaaattcgtgcacaaccagatgactttttggggctgagcgaaggtgggactagttgcaatagtcgtgtttgcatagatacaaccacgagataccaaggaatgaaataaagcagtcgagaatgcggaaaggaattttggatggctagtagagttgatattcgagcaattgagtgtgagaatctgacagtacctgtttttgagacccttccaacgctgcataagctcacaaaatacaagcagcagcatgaagacgtaattgacggtgaataccacatacattctaggcgaatagtcatctgaaacagttggagcatgactaggaaataataacggtcattgtcccaagtaagacaatcccagcgatgccctgccaccatgtaggaaatgcatttctggggggtaatatataaaatggaagcgaattgtgttccaatggaagaagcaataattctttcgatattactactgttaggagatactacgcaattgagtcaattgagtcaatcgagtcccctgaatcaaataaaaatacgtcgaatctattcgtcaaaaagcctctaattatattttgtcgcagaacttatcaatagttgacaactttactacttcaatcaacacctgaaactcaccatggcttttacttgttcagacatctttaagatcatcttggccattttcctccctccattgggcgtgttccttgaaagaggttgctccagctcactcttgatcaatattcttttgacaatcttgggttacattcctggaatcatccatgcgctctatattatattgaaatactgaggaagataaggctcgaatcgtgagaagacgaggttcgagcctccttcaccgaaggcgttctgttgtatatctgtgaagtttgtattttgattttgtacaaataaatttcggataaaatgatttaaactgtaggtgtatttagttgaaacgttagatttgaaggcccctctaaaccggatcaaaacacctactgtcaaacactagagggaagacacagctgttgcaagtactatgatgttcatcttgagagattggcatacagccttaaagatcgattctccattcatgtagtcctccctcaatactagtaaaattaaaactactaaaagacttgctcttatcttgcaaatctgtaaataccatttcagcattagagttaatagttgtgcagctgtgtagaatatccattgccggccactgaactgaataagtcaacggtcggttgtaaaaatagacatagagactataaatagaagctagcaactctgtaccaccaaccttgatcagtataattttgcatgcagatcgaagggctaatacttccctgtgattaaatatgattaacagccaagaagattgtaaaatgactgttagatggtgtagattagataatactggagctagctagtccaagaacaatagtaccatatagtgagagcatatctacattcccactagctgtgtgaatgaactgaagtcaaaactcagagacagtagaggtacatactttgaaatgtattcttagcaacctgaaatagctctaaaattggaacaacaatagctccaacccagcctcagatgcccgctcatgagatagaatgaaccagcgttcgaagattccgtccgatgtaggaagtgccattctatatataatagaagcttccgctgccgaagacgacacggaaattgcagagacacccagaagcagtttcgaagcgagtcaatctagtccggcgaatcaaactaaaatacgtcaactctatcgttgtcctggaattatcttacagacagtagattttttgaaagtacaaataattttgcaatcggtgcaacacactacaatctaaccatattacaccataatggcccgttcaaacgcctttctcatcttcttggcttgcgtattcccaccgttggcagtgttgtgcgttgacggggttgatcgctccttcttgatcaacattctcttaacatgtttgggctatcttcctgggctcatccatgccattcgtgtcgtcttgagggcttcacggaacgcaagatactaactgaagaagccattgtgctaagagtgtccatcgctccaacaacggcatgcgtcaggtgacctattgtgacactagtactgctctttatacgccgcttcatgtaagttcaaattccagttcttctctgaggctcaattaggagtgtacaatcgctccttcacaatcactggttagccatttctaagcctgttgatacagtctgttttcggcatcagcttttgtagaattttggttatcttttaatctcggagatctgatcactttgacctctgcgatttttaatctcgaaagggcgtcgccgtgttttgttttcttttcacacgagacgcgtccgcccctcttccaattatagctggttgttgatggctgttgaactttataggacaattctattcttgtcaaaaaaatccgtagatgtgtaataaaatgaaacacggtcagacacataacaaacacgaccagtaccgagcacctttcgacttccgaccgagggcaagcaaagaaaaaaccgactgcacaaactgcaccaactgcaccaactgaacatacaattgcatacaatcgtgcggctccatctgcccccggaagtgctcccccccatcacacgatatcaaattttcacccccccaagatgcgtcagaaaagaaaatacgcacagcaataaagcactccagaaaaaataacacaaagaataattttggtccttttccgattctacttctgaattcttgtactccattttggagcatcaaatagatgtgcttttttttcttttcttatcactgttcttttgagtttctcacagtttaccagatctttccaaacagatcgcaacatcttcatcttcagtctcgactggcaacccatttttgcattgtgcacctcacctaattgtcgatcttcgatcagccagaggtttcctcacactagaagctgaacgaggtgctcctaaaaggcacttttatcgaaccattcaaacagtcatagtctgctcttttctgacagacacccatagtcatctgagctttacagccgtcctttcgttttttttactttattgaagctttcatcaattgaaatttttcacttttttcattccgtttatattttgaactttgcacatttcacagcatgaaacaaacgtcatcgctacctatccaccgctccaagcccgtggaaatgacaacctcgttgatgaagcgttttgtcacgcctcggatcgtccgtgtggcgttgacggtattggccatagtcaacatcctctacctctcagcgtacctcctcggtgtttccagaagtggcacgcgaagaacgaaaatcatgtggtacggtcgtaaaatggcgggcaatgctgtatcagatacctccgggcaggtcgagggtttgccagaaacggcaaccgtcgccaagcactcggacgtagacgaaaccaatgcggaacagaagcagttgtatcccgttccaaagggtgtagcgtacgagaacatgaaaccgagtgaaaagatcaatgaaattctcaacagaatcaccaacgataaggaaaagtactggttgggccacactgagttaacagactacgaattacggataagagtcaaggacttcttgaaacagaactgggagaacaagcctacgattttctacgatcccagattcacactttcagtctatttgaacgagatcaaaaaccaatatttggtgaaaaaccccaaaaatgaaaagagcaagatccacgagatcgtagtcccttttgcctggtctgactgggtggatttgacaatgcttaacgaggagttggtgaagcccgagaacgagaggaaaacctgtgattacatgaaagctgttcatcacgctccagccagagaccccaactactgtttaaacaacgaagacctcactcaggacgaattggacgagatgcaattgccatcttctttctatgctcctggcttttctatcaagaagtcgcccacaaacaaggcttccaacgaggtcagaatgtgggaaggaaaatctcatttgttgacgtatgctgctaatccgctagcagtcattttcctcagtaaggaaggagtttacgaagctaagattgatggaaagcagcgtattgtagatggtgacctttttgaacattatttacaggccaatggctatgattcagctaaacatggagaagttcaatttgtcatgaaccctgtgaaagagttcaagtcgctcttggccaaggtcaagcctaatcccatgcttccagaagacgacttatatggaatggttgctaaaatcaaagacaagaatcccaccaagtccaaggaattgtaccttccacaacaagcgttcgactatcagcagcccaatatcgacgagcagctcaagagttacgacaaaaaattgaagatcttatgggatgccagcacgaacgagttgaaacatgaccaggactcaatcaagaacaatcttctttccagaaacgaaaagatgtacttcgagggattgagatacgccgattcgttttctcccagaaaggaagaaacttacttcagaatggctagactcaattttggtaatgaagagaacgaccacgatgctggttggcattatgaatggcgtttcttcaatggagccctcagatacatgaaacaaggctggaacgaggaagaattgttgattcgtgaaaaggttctcttggatcgtatcttgcgtaactggttcagattcgccaatgaaaagggaatcatttcctggatcgctcacggaccccttttgtcatggtactgggatggtcttttgtttccattcgatgaagatatcgatatccagatgccagcgcaagagttgactcgttttgccaagttgtataaccagacattaattgttgaagacatcaccgaaggttttggtaaatactttatcgactgttcttcgtttttacaccaccgcgggaagtcgtggaaagagaaccatattgatgctcgtttcatcgacatcgataccggttcttatatcgacatcactggccttggtatctctgaagaacaggccccagacaagtacaaggatttgattgaagaaagcaacagccgtggtgcacctagaccagtgtataactgcagaaacttgcacttctactctcacgaggagttgtcccctctcagattcaccatgatgggaggtgtgcctttgtacgtgcccaacaagatcgaagagattttgaacgacgaatacctgaagggtatgtcggtatactactacgaagatttctactttgtggacgcagtgaatttatggatccacgagtccaaattggactttttgttcgtcggacaagaatacaaagacagcttcggagacactgacccagagaagttttcagaattggttaagactatcagtgaagagcaagttgttcttttgctagaaagagacgaagacattcttatggaatactacttgactaaggacatgacggagttgcaccgtaaggagcttacctacttgtttgacatgcccaagggagagaatacgttgattggcgaaatcggccatcaaaagacacagcaggagatttctagcaatcccgaataccacaagttcacttcggagctcaagttccagaagccgttcagacggtctatcttcaactacgagaagatcgacaaacccaagcaccatgtagcatagaccagacataatagcatagttaataaattagagtgtaatatagttcgcacgagtagcctactgtcagtttgaaccaaattgacaggcgagttcaaattgacaggtgagttcccggagaaggtgtagacgagacaatgagagaaccagatactttcagagtggtgaaatttgaaataaaattctgccatcgaatttcatgtaattcttaactatgggatttgaatcgctagccaacttaggctatccagcgcaagacgcacagatgcagaagcacaaagtggaggctccgaagaatttcgctggagtggcggctaaataccagaagagatcagacagacaaacagagaaacaggcagacaaacaggcagacaaacagacaaacagacagacagaaatatagatggacagcagtttttagagacggctggtgctcaccttgtggaatctgacaatatgctggtaattgagagttggggccgttagtcgtaccaccacgccagatagattgtccagattactgattacgagggctgcacattaccacctcagacaaatcctgcaaattctggccatctcggataggagatacgaggttagcacaagatcgacagacaaagaaaggatcatttccgacacaaaaataacattgaatcaccgaacagacattattgccactacaatagcaacagtgtcaagtcgatacgatctgttcatggccattgttggtgttcggtttccatctcttgcgatttatgttaatccgggaagtctggaaatgaaatggaatttgcaaagcaaggcgagttttcgcggccacagacagacacagatagaccgaatcaaagctacggacaggtacggacaggtacgcggacacagacacggagctacagctacagacagatgtagatcgaccgacttagatagatccaccaacagcagtacagacagaagcacagatacagacacaaacttcagatggatatatacagacagatgaacagacacagaacaatagacacttttacacacagaaggccgacacagatgctcgctgatttcccggcacaacagacacttgcagcccacaatgtggtggagtcttggcagtttacacagagccacctaggctgtttttgtcgtccaattgcagacttgtcgcggctgacattgtggctattttatcagacaacaaaacacgcgacacggaagccagacagattgcttgccagcaaacaaataacaacagcagctcgagccatggatgttggctcgcttaaggttatctcggagttggtaaaaatagctcgatagaaataaagctgtatacagtggaattattgtctgtgaactgatttaaaatctgtgaacgagttaggtttagtatcgtgtgccgtttgcagtgcatgaaaaaaagaaacggagaattccaggggagtcctgcataccggaactcatttgcagagacaagcaccgagaatgagttccgaccctgcactcatcgatcacgctttcaagtatttttgtaattttgaaccagtcttttgctatttatgtatttgtgtgcaggctgtattgtcagactcgatttatttattttagtattttttgttcttttttgttcagtcacgggatcagattcttctttgataaaaggtttactttttcttttcacacaaatagatatcaaagctggttgtcgttctacagcagttcagaatagttggttgaaatatccagaacttcgtgaaacagacacaatttttggagtttacccaccttcgtttgaaccctcgaaaaagtagaaactcacgacgtttccccagtcttttttggttgctctatctcgattttgatagagtaaatttttcataaaaactccatcccatcatcaactttcaacaactcatcttcattcacagtatttaactcaatttcgtgactttcgttcagtatcacatctcaataagaataccagtatgcggaagtatttttccatggtgaatgaacgagtggtcaaaacggcctttttgctggtgttgctcatcaacgtcttgtactttgttagggtgtattcttctgaagaaatccagctcacacgtgctgctcttgctcatgctgcttctacagtcttttccactgacgaccagatcgagttccccaaggacgttccgttggaacagattacagattccaagcagagagtctcgtatcttttgcacgaagtagacgagaacaaagatggcaattactggttggcccatacgaacgtgaaacactcgagtttgaaaatcaagcccagcgactttttgccatctgattctcctaattggctgaatcgccccgagcttttctttgatcccaggttcaccctttcaatctacttagatgagttaaagcaccagttgttgagtagaaaccccaaaaatgagaagtctctcgactctgtgatcctgatgccatttgcatggtcggactgggtcgatttgacaatgcttaacgaagagttgtcgaaacctgttgatgaacgcagagactgtgaatggcttcaatctcaagtaaataagcctacaaagagaccatttttctgtgtaaaccttaaggatgccacggatgaagaaatcgaagaaacaggcatttccaaagagagcttacctggtttcttggtaaagacttcgcccatgaacaaagctcctcataaacaggttatgatgcaaggaaaggcacacttgtatgcctatcaacagaacccattcaccattattttcttaaccaaaagtggtacatatgaggcccaaattagggacaatcgtaagagacttgtacacacggacatgttcgaaaactatttgagcagaagaggaatcaatccaaatcatttggaagactacggcaatgaaattgtattgaatccccatgatgaattctcaagtttgttgaccactgttgctcctagacctttgaactgggatgacgatattcacaagatgaatgccatcacacagcaaacggaagtcaatgcttctcgtgaattgcatttgaatcccgaatcgttcaactacaagcacgaggctgtgctcaagcagttgcacgattaccagtatcgtttagacaagcttgaagaagcattttccaacgagttacgttacagccctgaagttttcaacgagttttcgcttgatcgtcatgagttcaaccactactctggtcttaaaactgcatcggaaactccaattcaagaggagccaacatactataagttagctactttgctcaagaagaacggtaatgtagatgccggctggcactatgaatggagattcttcaacggtgccttaagatttatcaaagacgatacttggaccatgaaccagttggaaatcagagaacaaatcatcttagatagattgttgcgtaactggttcagatttgcagaacaaaagggcatcatctcgtggatagcccacggacctctcttatcatggtattgggacggtctcatgttcccattcgacatcgacatcgatattcagatgccttcagctgaattgaacagattatccaagctctataacatgacgcttgtagtcgaagacatcgatgagggctatggtaaatacttgatagactgttctaccttcattcaccaccgtgacatggcatacaaggataaccacatcgatgctcgttttatagatgttgacacgggtacttatatcgacatcactggtgtgggtaagaacaacgagaaccctcctccggagtacgacagctatatcagaagcaagaatgctaaaggagaatctgtagagttgtacatggacagaagaaagcactggttgaactttgagaagatcagccccctcagatacacactgatcagtggggttccagtgtatattccaaatgatgtgatgtccatgctcaacactgagtattcccatggtacttcggctttccactttgatggctactactatgttccatgtcttagattatggattcaacaagacagagtagccaagatcttcaacgaaaatgacttcaaggtcggcgacaaaatcgacagagacaagcttcttaacttggtggtaaatatgaacgataatgacaaagccagactacttgaaagcgacgaagagttactcatggagtattacttgactcataagcacactggcttgcaccaattagagaagaagtttctcttggatgctggtttgcagcattccattatagatttacacgataactatgattaccatatgttgacgtccaactttaagatgggcaagccgttgagaaagtctttgtttgatttcgagtactttgagagatttgaacacgatgagtacgaaccagcaaagggagatgagcctcctaaaaaaatcattaagccaaaggtcaaatcacagagtttggctgctggtaagttggagcctataaaggttgttcctaagccagatcctatagctgaactctttaaggatcaaaagccggcaactccaaaggaacccgaacaaccaaaggtagctgaacaaccaaaggtagctgaacaaccaaaggaacaaccaaaggagcaatcaaaggaacagccaaagggtaatgaagaacaaaaggtaccgcctaaagaagaaaataaagaacaacaggtataatgagtccatacacctgctaataatcaaggtcaattagaacatttcgcatttacgtcattttgctattcgtagcatccatgtttcactgtatattagaataaacgttagaatataagaagttgtagtttttcgcagccatttttttgaccactactgaatgcaaagtgagaaaatgaaagtgagtacaaggtaaacatagaaatcacacaaggatattcttggtttatttacgtaattgctcaattaaataaagcccgtattcctacctacatttatcaggttccttataaattaggtagaggctatgtgcgcgacattatgaagataagaagacatcgcgacattttcccaccacctctatcaaaatgaaatttaagaaagctgatagtctaaccatcaccttttttttatctacaattgcatcgatatggttcctgttagaactttcggcagactcctcttgccgcgcgttcaagcgttgcgattatatgcgacctggaaacccagagcgactcccaagagagcatacgcgtcgtctccagtctatacgcgtgcaagcactaccaaaagcgcagagaaaacgacttcaaaagcttctgaaagggaaattcaggaagaagtggaagatcgtcaagatgcagaaagtagctcctccacattctcatttctggattcgcctgtcgttaccaatagcaacaccaacatccttgaacccagcactaataacagtagtactatctcagctattaattctgatgtcccaattgactggtctggctcatttcacggattgggttccagcccgtttgctcgtgaaatagccgatattttgttggcccccatagctgacgaggacatcgagattaaaccggacgggttattgtatttgccagaaattaagtatagaaggattctcaaccgtgcatttggacccggaggatggggtctagccccaagaacggagtcgtttgtaacttctaaacaaattagtagagagtatgcacttatctgtcacggacgacttgttagtgtagcccgcggagaacaagactatttcggtggagaagagaaaatcactactgctttggaggggtgcaagtcaaatgccttgatgagatgttgtaaggacttaggcatagccagtgagttgtgggatcccagtttcatcagagcatggaagaagaaatattgtgatgaggtgtttgctgagcatgtgactaccaagaagaagaagaagttgtggaagttaaagaagaacaagacgttggactatccgtataagattgcttgagagataagtagaacaggtggtgtagttgaagcaacggaaatagtgttttaaagattgatagaagaagaagaagttgtagaggtgagtaattgtaaatagagcgatctaatggttgcgaaatagtacatgtaatagaaagatagtaaaagtagaagaaatataattaaatcacagaatggaatcgtattttaagaaggataaggactatgttctagagcttcagttgcatttgcttcttccgtttttcagctaccagttcaagttgtgtggagtatgttacaattctcttgcaaatggcactccttctgttagttatattacttaatctacatttaatctctttcgatgttttatattggtgtacagaatgtaatgcggtggctatcgaccagccatgtctatcgaagcacggcgacgaagtagacactagactggactatttaggacgtagacataggccgaatctaaatctatatctacaactagacaatactagaaatacctagatatggtgttatacctagatctcgtccagtatctacaagtgtggaaagtgttggtaagttacttgtgatgatatgcagagtttatggcttgaagataccacggccagcacccaagccgtccacggtctgagacaaaggtcttctcttccatacatcccagaactgctgcttttcaaagtccttgtcggtgttggctgcttcaaacttgacattctggccagctgaagatggagactgagcccagtaggcgtggtcgacgagggcggtgatagaggcaccggcaattccagtcaacaccttgtgctttggtggcatcgacttgaatcctacagttaacacagccaagttaccggttcctacagcccaaaatgtattccagccatcattcttctctctcaagttagtgatgatacctttagcggcagtagctacagtggcaaagccaacagcagtgagtggcaattcaaccttgaaggttgttctcttccacaagtacaaccaggcgtacgctccaacggtggtgtagaagccaaatttgaagatctgtaacgtttccttcttggtgtctactggcttccaggcagggtaggccgaggcattggcccagttgacaaaaggcgtggggaaatggttggtggaatccgcatagacgcgggctccagactcggactcggactcagacattgtatagtagaatataaatatagagctatctataccaacaagtagtggtgattgtgagtttgtatcttggattggaacagtttttttctaccaatcaaagagatgattttggcgagcagaaattcatcatgtgactcaagaggtgtgatcaggtcaccagccacaaatcatctgattcatacagaagtcgcactcattgagtagaattctatgaaaagattttcaactatttttcaattttgcactggtgatttgacgtcaactttatattcattcttccattttcttccgcttcctaattcttgtagagtcgtctctccatatacatcatgaacaagaccttcaccatttcggccgtggctgctaccgcgcttgtaggctatgctgtgtggttcgactaccaacgccgacactcggctgacttcagaaagaacctcaagaagaaagcagtctcccagaaaaagaagtcggaaaaagccgaggctgaaacaaagaaaaacaagatagaattgctcaagaaagccttgaccgaagacttggctgccaatccagttcctaccgacttgagtgaaaaggagtctttcttcatgcagcaggtggctttaggtgaacagttggctactaaggaagaaaccaagatcgacgctgccatctgcttctacaaggctttggctgtctaccccaacccaaccgacatcttgggaatctaccagagatcggttcctgaagatgtttacgaacttgtggtcatgatggtggctttcaagcctcctcagtctgtagctaacatcgtaggagatgccccagacaccaagcctagagaggatgatttagattagataaagactgctctgcacacgaaagaaccgaacctgctggaaaagatccatggattgatcttcgtatagtgtacaacttgttgctgatctaaatcatctacaagtcttgctataataggattaatttcgatttaatttcgatattacgatagactggaacgactacgcatccgttttcagttttctattctcgattttatacagatcgatatcgtcccaaatttcggacgatattgttcgtttgtctatttgggcaggtcaattcgtcatctattccgctacatatttgtctgctgctttcgtctaagccatttttattctgtcatcacacatctatttatcaccaccaccattgtacatactttctctttaagagcaatacaagaactcatggattcgttttgtgtacagtagcacatgttcaattcacaattcagacttaacacactgtagtctaacttttaatcaaaaagtgtattcgcactctttcatgaacaaccggtgaattatcaattctgtgtatttatagatctggattcagctgtgccatgctatccatacttctcctcctaccgctctatttgcttacggcgcgatgcgcaaacatcaccaactccaccatccaatctcagtacaattccaacaatttccagtaccagggcgtagccatcggaggctggcttgtgcttgagccatatataacgccgtccttatttcttgcctttaaccaaacggcgaacaccacagagaaggatattcccgtggacgaatatcactattgtaagaaattgggctacgaggaagctgagaaaagactaactcagcattgggacacgttctacaccgagaacgactttgccgacatcaagaatgccggcttgaacatggtgcggatccccattggatattgggctttccagaaactcgatggcgacccatatgttctgggagcccaggactacttggacaaggccctagaatgggccaaaaacaacgatcttaaagtatggatcgatttgcatggagttccggggtcacaaaatggatttgacaattctggatttagagatatcggataccctggctggttcaacagtacagaaaacgtgaacttgacaaaacaagttcttcaccaaatttaccacaaatatggtactggagagaacgccataaattatagggacaccattctcggtattgaagtcgttaacgaacccttcactccaaagttgtcgatgtcaaggttgcaaagtttctatatagacacctacattgactccagaaaaacacagactctcaacaatacaatcgtcattcatgatgggtttgaggggattggctattggaacgatttccttgctggtggaaaagtttattccaacagtagctatctcaacagtacgaatagcacatccaaattcctgaaaagggacaattacttcccatttaatgctacaaatattacagctgttgcttcagcagaagtttttaacgtgttgattgatcaccaccattatgaggtgtttgcctcttcagttgcttcgaacatcacgacacatttgctgaatattcgaggatacagtcaatctatcaaggacgagttaaagtatcatccggctgtagtaggcgagtggtcagcagccttgactgactgtacaccttggctcaatggagtcggcctaggagctcgatacgcaggagaagcaccctatgataacactaccaaggtgggaaaatgtgacaacatcaacaatttcgacaaatggaccaaacagcagaagaaaaatacccggaaatttattgagatacaattagatcagtactctcgttattcgaacgggtggattttctggtgttggaagactgaaaccaccatcgaatgggatttcaaaaagcttgtagagttggacttgatgccccaaccgcttaacaattttacgtatatcgtaaatggaacagatacagatcctgatagtggagcttctcttgcaaggctcagtttgtttatcccagtggcactggtcttgatgttcgttgcttttttttaaatacaactagataatgcttatagataaagattgtacgacggtcttcaattgatgaaagttgtgaatctccgaaatggttgcaaaataaatacgaatagtctaaaatagttgcgaaaaatcagaaatcagcaatcagcaatatgcataaagataagaaaaagaaaagacaaaacacttcttgcaattcaacggagcttagacgaactgaaggtaactgattactgttacagtatgatattgacatggaattcgtatgcttttccactactgccattcataggtcaagaaccacaaaaccacttcgtctccacacacctgaaaatgatgaaaatgtgaaaattcacgtgaccggccccggtaatttcgtgctgaatcatattatgactcttttaatttcatcgttactttcaccaatactacacttaacaaactccattccattcaaaatgtccaagtccgtcaatgttgccatcattggttctggtgttgttggttctgccttcattagtcaattaaatggattgaaaacagctatcaagtacaacgtagtatacttagccaaaacgtctctggaagctctctattcttctgactaccagtctgtcgatttgagttcctacaagacttctgctactaaacctaccttgggattagacgaattgctcaagttcttgcaaggagccaagaaagcaaccatcttggtggataacacatctaatgcctctattgctgactactatcctactttcataaaggcagggatctctattgctacacctaacaaaaaggccttctcttctgatcttaagacttggaacgagattttcgccaattctgcagttcctggagcaggtttggtagcccacgaagctactgttggtgctggtttgcctattattggtcctttgagagacttgatcaccactggagacaaagtcgacaagatcgaaggtattttctcgggaactctttcatacattttcaacgagttctcaaccaccgaaaaatcagatgtcaaattttcagacgtggtcaaggttgctaagaaattgggttacactgagccagaccctagagatgacttgaacggtttggatgtcgccagaaaggtgactatcttggccagaatttcgggctttgaagtcgagtcgccaacttcgttcccagtagaatcattgattccaaaggaattggaaggcattgaaagtgctgctgagttcttggaaaagttgcctaactatgatgccgatatccaaaagatcaaggacgaagcctttgcagaaaacaagacattgagattcgtaggacaagtagatttcaaggccaacaaggtttcggttggtattggcaaatacccattcgaccacccattctctgctttgaagggctctgataacgtcatttccatcaagacggaaagatatccaaacccattgatcgttcaaggcgctggtgccggttctgaagtcactgcacacggtgttttagccgatacaatcaagattgctgagagaatcgcgaactaaatctatgagtcgttattcattacatatatacatatatatttacaagacaaactttcaacttttcaacttttcaacttctattactgaggaagatccgtaggcatcatatccaagggaaactcttctcgccagttgcttttcgcttcgcggaacaattctttcaaataatcttcattctgacaagcagacctgaagttcaacataacctgttgggaatttgtattgtacgtcgtgatgctaccgtcaaagtcgggaattgatgtgagtgtagtattcactctggtgatatggatattattgggagcaaggaaaaagtctccattgtcacgaagctcaataatataagtgccatttttatgaatatattgggcatattgaaacgaaggtttaccccaactgtatgagatttcaatactatctttcagaaagaaaagagatgatctgttatccaagaggaattcaaatttcttgaggaaatacaagtgatagtaaaacctattctttctgagaatcttcacatccaggaattcaggatcaacaagagggttcacgcaaagtttgatatcgacaaaggagtggaacggactgatcagaggaatattacatagctctttccaaggagtttccactaatttcaacccatgtctctcgcacaatctggaccagttggtaatggcttcgtcaataaaccttcccgtggtacttagccattgcaatctgatatgataacaatgctctggattatgaactctgtcataatgaacggtaacaatttcgggtctgaatgatttacctaaactgtcaacattgtacttaacggctctgcttaagatgaacttctttcttcttctacttccttctaatgaagatgctccagagtctgtaattaaggtactagttattcttttcaaatcaagcggatcttgcaggggcaaagctggtgaagagagtgattcgacatcggaattgtttctcgtatacactggagtattggaatcggtgtctggcttttctgaagaagtcttcttgattccaaaccagcctttcttcagctcgatataggtcttgtcgatgtactcactttcaaattcatagaagtagtaaccatccaaaaatccatgtctcagttcaacatgcttgaacaagcccttgttcatcaacgactgaccatagcttgtggcttcgtccctggtctgaatatcttcaaaacattccaataaccacgagaccaactcacttcctaagaaacaatgcaaatgtctcttgaaatgccacgttctatcaactaatggtagaccagtagaccgggtctgcaattcctctgctaattcagaaagtttaatactcttattgaatctcatgctctctggaatcataagtccagcctgatttccagtattgtcaaagttctgtgcctcctcattcaagaagtcgtacaagttgccagtgtagaatacaatttcaggcaatatttcttctttcttagaagtaaccttcctcttcaaatactttcctttttcaatcatagcgatcaactttcttaagccttcaacacgaatttcttcgtctgtcaagttctcattggtaatatagaaagcgttcttaggaataggtgctggcattacaacgaacttcattttatagaaatccttatttgcatctggcatagcatcttcatacccagctaaatattggtcgaactggttccaattgtacatctttggtttcagattgataccatcaattttcgctgtggagtattcatcagcataacgagttctaattaatggaaagtagttggtaagtttggcttggccaagagtgatcttgttttcttcattagtcaccgtcttatgatacaattggacatttaaattcccgttgtagtcaagatagatacgatgtatctcatctccaagagacatataaattcgtgctccgagtgagctgtgccttggcaaatactttatcaagctttccacattgccagctggcttgcgttcactttcagcttttttaacttgatcaccaaaacaaatttggaaacctaaaagaagtctcaactgaatcatttcacgcatcaattcgtgagttgtttcaagttccaagtagttttcatagtttagcaacacattgtaaatttgaaacgtgtactcagtctctaatatctttacagacggaaatacagaggttgtaataggcaatgcggctggagactgcaatgacctccacttcaccaatctacgtctgattttatctgggaaagcattactccacctactcacattgggatacaaaagtgtatctgcacggtattcctgagaagggttttcaatctcagtccagaagatatcagtaggattctcagattcgtaatctacgttccctgaacctttactctgagatctgcgtttcgaaaaatctctatctggacgtttcataaggtgacgagacttacgttcccgttcaacagatttcgttgtcctaggttctgcaggtgtagaagctcctgtctcagttttgaataaggaatcactcttaatcaaacgaggcgaatgtgtttcttttctcaagatatccatggatcttttgctacttattgatctggtgctagaaatcagcggggctaaggaagaaatagtgcgatcatcagaaatcttattcaaattgtacaacgtcgacaaagcctctccattgctatgtgtaacagttcccaacaccgatgaattcgagggagtcaattcggtaggctgcaatcgagttctgttgttgaaaatcaacgaaagggtcgcattggcattttttaaggttgtgggtttgaatttggaattgttcttttcctttatttcataactgtctattgccttttcatcgttttcctttatatattttctatgattcaccggtttgaaaaggtcgttatcgtagttatccatggcttctatcatagtaggagccttttgggtaacttgaaagcgatctattctgatctgattcatattgttttccatgactcccatcatttgcaattcataaatcttgcaacgagggatccacagatttgcagactggttcagatctttgtaataagaaatatcacaccagttaggaacgacgtgctttactttgccatctttggaaaaacgaaataatgggacaacatgaagaggaggttgactcaaacaaatgatgtccaatccataatcaattgtggacatcttcttgcttgtttcaagcatgagctcatagtcaacatcatatatacctgttcctggagttacaacgatataatggttcaaggaatgcttaagatcagtgttaatgaatctgttgtttgccaaggtcattcccaagttgactgcttccaatatgtttcctttcacagaagggagaggttcaccatccatagtgtagtggtttgtatcttgctgattcaacatgatatcacgtttgaagttagcaaactccaaccgcaaattggccataatcttatcccagtgaaagatgttaacctggtctacgacaactctgaagtagtctctgcggttattgggtctctcaccttgacccaaagttgtccacggtatatcagtcaaatccatgctggtgaacaagactattgtgattgcatgatgggtatttctatctctccatcttttaaacatcttgggaaacaagttgtttacaagcttatggaacataatttcgccattttcttcaaagtgccacatttcccgtgacaactgtaccaaaacggtgagctttgcactttcagatctgaaagtgactttcgtattctcaccaatgtagcccgagaagacgttccgtccattcttgtagatatactttacgatgcctgtcctgttgtttaggaacaatagtcttttgtcgatgtgtacacacgaattcaccaaagtggaagaaaagttccacatagagtctcgtgataagttgacgtctttgataaagatttctacggaatcagcttcaaccttagccaagttctgaatccgtttgatctgcactaaactacgaggtggaatatccaacaatttttgtaacggattagatatcaacgaaatctggaacttagacttcgctataggtacagcttgactcgctggttcttgttggggggattcgaccgattgtaaatcatcttgcgcagcggcattattatctcttatgtttcgatcgttgatgacgaagagcaactttttcagatcttcggtttccaacagctgtaacatatacacttgtccgtttcgcacacctcctggtatggcattggagtcgattattacatcttcatcagaagttctaagatcatgaaaccatactgttagagggatagggtccttaagattaggttggactgtagacgtctgcggagtatcttctcttatagtagttgctcctagggattcgctgtttttcgatattgaccgtaccaagttgggggtctgagtctgatgaatttgttgttcaattggtgcatgcttctttcctacagttatagtacttctcatatttctattcataaagtggttaccagaagaagaagacgttacacgggaagctcctatttgaatactcatctggctggcagacattgagttcatggagttggacttggataacgactgtgagctcaagacattactggacccagaatggtttcgccttgactggcccccggagttgaagattcgcgcatgctgcatttctgtgggtgtttgaagttctggaattcaattcagagatgttataaacggggatggactgtcaatgtatgtatatgtctgtttgtgaaaattggatattcaagtaaagaaaaatttatcaaaaatggataactgaaaaataccctttgatggagagtaaaattaaaaatcaagctaattgagtcgttctaaaacgaccaggacgttctgaaacaaggtatggaagacggatgcaacttacagactctcgagctgtccctgtgtgaaatgtctgaggacaggtaaaagaaaagagtctcttagataactctatattgattcttttcggttcaattttttggtgcgagtagattttttagatctagatctagtggggaagataagtgcacaagagaaggactgttatctaattgtctatatattgtaagaactagaactatatacatggagatgtcgtatgaactctaagattgtttctgttatatatctgtgctcttattttttgatttcactacaaactcatcaatgtaccatttatggaaacgataatcatcggtagccaactccggatggaacgaggttcccaagatgtgcccttgtctgacagctacaataagctcgtggtcgattttgccatggttcttcaagctgtgcaatacctctataggtgccttgttattgtaattattttgtgaatagaatattgagtctgattcagacttagactctgtaggtccatcgtgcaacaattctgtgattacaggtgcacgtataaatacagtcggaaatgcatggcaatctgggataaacaggctgaagtctaatggagactcaaaagagtctagctgtctgccaaaggcgtttctagtgacttctacattgaggcctcccaacaacttttgtcctacacggccattcttcaactgcttcgacaaaaagatcaaaccagcacaggttccccagataggattttccagcttgacgtagtccatcaaaggctgcaacaagttggtcctctcggcaatgagagagatggaggtgctctcgcctcctggaatgaccaacgaatcacatctccggagctggtcttcggtcttgacctcgatgaacgtgaaggtaaacttgctgtactcctgaggatgcgactctatgaccttctggaagtattcaatgtgttccctgaaggctccctggagcgcaagaaccccaagagtgatttctgtggatgtagtcatggcgaagacagtgcaaagtgaagaatagtgaaacagcaaacaaaaagtagtgtaaagttaagtacagaatctcagtatggagcagtgggagaatggctgaaaaggagattaaggcaattcctacgactcaaaaagtagccgtgatgtctgctctgaacagctagcgagatccaacagactttatacgccaatctacagaatctacagaatctacaaagtaatctgagtcaggaatttttcactttctctcaattgataacgaaatacgactcccaaccgcactttcccctcaagcgtataggcgcttacagtgcaaaaggacaggaactgcatatcgtgctgatttgactctggcttctgtgagcggtttccccggtttttgataagaagccctgcagtgtccggaggcaacgaaggtctccatcacggccggagattttggagatgtgagactcttcaggtggcagaaaccgaagcaattcttgagctgaccacagaaattataccattccacttcctgccagctctagcgacagcagaaatctgggcccagttttgcgtctctcgacctttcgctgaaaattttcacatattctcttgtgatttcttggagatttgcgccgaagtcaaaaagtgactaagtgtcggcgctggagtttccgctactgaacgctggtcagaagatctcgcctttgcttgctctccatgactaatagaatttcataacgtcacaattcaccgttgttcctgttagtgagtgtctatccgaatctgatctcggcgaattttcaggttgaaaattaattttcacttctgctatataaatatggctttaccacgaattgtagacggtagcttttttgtaattgaatagccaattcttctcttttctctccctctacaacctcgtaattgctacaatgtctgactttaagatcaaggccggtttggcccaaatgttgaagggtggtgtcatcatggacgtcgtcaatgccgaacaagccaaaatcgccgaacaggctggagcttgtgccgtcatggcccttgaaagaatccctgccgacatgagaaagtccggccaggtgtgcagaatgtcggacccaaagatgatcagagagattatggaggctgtttccatccctgtcatggccaaggtcagaatcggccacaccgtagaagctcaaatcttagaagccttgtccattgactacattgacgaaagtgaagtcttgactccagccgacaagatcaaccacatcgccaagtccaactacaaggttccatttgtgtgtggagctaaggacttgggcgaagccttgagaagaatcaacgaaggtgctgctatgatcagaaccaagggcgaagccggtaccggagacgtctctgaagccgtcaagcatatcacaatcatcaaaaaagagatcgaggatgctgcagccttgaagagcgaagaagaaatcgctgcttacgccaagcaattgagagtgcctgtggctcttttgaaggaagtattggagttgaaaaagttgcctgttgtcaacttcgctgctggtggtgtagctactccagccgacgctgctttgttgatgcaattgggctgtgacggggtctttgttggatctggtatcttcaaggccaacaacccagccaagttggctaaggcaattgtcaacgcaaccactaactacgacgacccagccaagatcttggaatactctacagacttgggtgagttgatggctggtgttagcatcgactctatcagagacaatgaaagattgtcccagagaggatggtaagacaacaataaagtatatctgtttatagtatatcaaaagtgaattgagagatttgtatttgaaagataaactcgtttacataatattcatgaatgttcattattagtaattcaatatttctacaaagttttctaaagtatatgtttggagtccacgtcatgatcaaagtgcttggctgaatagaataaccacacggcaagaccaaagataccagtgcagcccaagacgacgcaggcgtagttcatactggcagtgctcacaggatagtagatgggaaagttcaaccatatcatgataaagcagatccacaacacagagatgatgtttaaaggcataccgagcttacccaaggagaagtagggcaaactctttccttctttcaagacagctgcgaccagactatcctggttgtcaaacctaacgtagggagacatcgagaacttggatcttgtcaataagcacattattggtggaacataggagagattgacacagaccatggctgaaccaagcacagcatacaatgccgtagaagatcccatgatcatagtacctaggatggcacagattagagttacaaacgtcaaggcatatactggagtcttgagagtttgcgatactcttccaaagtaagttccaaaaggaagacccttggactttgaaaatgaccagataagtctagaagtggaagtgtagtaagtgaaggaggaacctacaaaggtaaaaatgaagcacaagacaccaatggtagtgagagtcttagaactgaaagaatcatacatcaactgaacaattggttgcccacctaatgggacactgaggttgtccatactaacaatgcagaacatgtagacaatggctgcgaaaagtgcaaccactgcagaaacactgttggaaatcaccatgaccaaaggaatatttctttctggttcggcaatttcgtcagtcatatgagcagccccatcaaacaaacatacactggcaatacttggaagaagtcccaagaagaataccaccccattagaggaccagcctgtttcgttgatgatattcttgaacacgaatttcgcggactgcttaggatcagactttataagtaaagtgatgatgacaaaaagagtagcaaagttgatgatggcaaccaacacgtcaatcatgtatggcaagatgacgacgaagaatacgttgatgaggtaccctgctacaataattgcaacatatacaaggtagtaatgccagtttttaggaacgtaatccggatggtatatctgagccaaagcaagaataaacatggatgcaacatatgtagagctgatgcaagcaaagatccaaccagcacacgagagaatacctgaagcaaacgacaacactctcttatacgctttgggagccaaacagtatgtccaatggacctgagctgaagaatgaggatatgcggaagccaattctgccaatgaacagcagatgatcaaactcatagtagctgagagaatgaatccgtatatcaacaccggggacccaccgaccccaatgacagtacttaagaaagttcctaatgccaaaggagagcagatcaatgagtattgcaaagcgcaagtgctccagagactgaaacgtttctcaagctgagctgggtctttgaactcgactactgagcctacagacttttggtctacagccacttgcgaggcatccttttctggggaagacatcgacttgttgtatgtttcagggttttaagttatctcagggccaaaagacgttaaccagatggatctgacaatgcatacttcgtcatatatatgtataatctcttctacaatggcttcgcgttatcttttgggctacagcacaaaatgaaggtgattccgctaagagtgctatcaattctgataagcctctacaatggaccaatgcgggtccatagatcttcactgaaaatctctctgtaagtctaaatctgcttgtcgatattattcgccttaaagagggaactcacgctctacaaaatactaagcccataaacttgctggaatgagtccaggatgttcccgactattcttcctgaccccatgaggagcacactcaaacctggaaaagtggtttgccaggttctcctccacttgggattacgccgttcactccacaatacacaaattcagtgatcccccacgaaaatccgaaggagtcaattaaatgtcaactagccggtagcggctggagagagaaaaaattagcgctcacatcaccacacaaaaaatatttgcaatcaatactgagtagctctggccagtggagttgatttcaagtcccagagggaaacatggaaattaaatcaggcacagtattcgatgttgtactatctgtggatcagcagcactatctcggaaaaactttgcctgagagctacgggcgggttcggctgtgataacaaaagggcttttagcggcatttccataacaggcaatctcatacaccagtgacattgtggccaggattggatcgcatatggctacatgcactaggtgaggtcacttgactcaggtttcacgagatgggccagatttgaagacctttctggaaggggtaatgtgttaagataagggctggtctgggcattcaattccgcacggcactttcttctgtcaatctcacagttaaggcgcggaattagaacttagatagtcagaagtagacctaaagctgaagttcgtggcagatattcgttatcaaaatgtcacgtcttagccaagatagcctatctgctcacaataaatagtggaggtctattggcaatatccacgataagattgtctcagactgcctggaagattttcagcccggaatctgaaaaggtaccgaagcctgcggcaattgcacaaaaatataagtaaggaacaaaaagaatttcaaatttcgaccggtttggggtacggaatctaacaacgatatgccgaccacaccttagataacgagggtacctactcgcctattgtgatgcaagagccttgaaccccagatttggactgcagttttttcacctcctctattcttttgctagatataaaagcatcgactctggcacttaccagattagacctagctagatttgcatttgacatcagttaatagagaacaagtcgataaggtggttgaaatagtcatttcgttttgctattcaactttagaaccgacattcttcattttataaagacttgggcttttttattgttcttagtgggattaatctatagctatgtcacttgataagaaagaccctggttcggtcattgatgtggagaagataggctccgtcgatagacattatgtttctaccggattcgatgatttcaacgataaactcgatcctgaaaagtatggtcaaacaaagagaaaattatcttccagacatgtcagtttaatgatcattgggcagagtatagggacagggttgttcatcggtcttgcactgccgcttatgacgtcggggtcgctctctttgttcatagggttcttattctgggccattctcatgatctggccgttgatgcaagctgttggcgaaatgtgctcatacttgcccattaagggtagtttcttgcactactgcgccagatgggtagacccagctttgggctttgcttgtaccttaatctatttgtacacttcgttgatgttcatttgtcttgaagcagttgccgtggcgtcagtcattggatactggactgatatcagcaacgcagtgtggataacaatcaccattgtgtcctacttcttcttcaacatatttggtgtcaactggtacggtgaaatcgagttcttctcatctatgcttaaggtattgttgatcgtaggcttgatgtttttttccttgatttccatgtgtggtggaaaccctaagggagacgcctatggtttccagcactggaaggaaggaggacttttcaagtcgtatctcgttcctggctcaactggtcaatttttgggttggtggaatgttctcatctacgctgctttctcctgtggtggtccagatcttttgggcttgattgccggtgaagtttcgttgcccagaaagaacattggtttggctgctaagagatcttacattcgtatctatcttttctacttcggtgggatcttcttcatgaacagtttgtgttcttccatcaacccagacttggtcaatgccagagaagccggtgctgtaggtgctggtggctctccttgggtcattggaatcagagctgttggagttcatggacttgattccttggtcaatgcctgtattatggcctcagcctggtcctgtggaaatgggttcttctacggtgccaccagaactgcttacagtgcctctttggctggttaccttcctagattcttttctaagtgtacaaagaacggggctcccatctactgtgtcatgttttgttctgctgtgtcatgtttggcctacatgagtgtgtctacttcttctgctacagtgttcaactggttcattaacttatcaacaactggtttgttgtgtacttatatctgcatgtggtggtgctatttcaagttcagaaaggcattgcctgcccagggcatcgacatcaagagcagctcctacatctactatctttcgccaaagtttgtctacccatacatgtcttactttggacttttcatcaacattttggtgttgttcttcaacgggttctggatattcttccctggccaattctcggctgcaaacttgttgacatcgtactttgccccagtattctttattgcattattcttgttctggaaggttttcaagaagacccacttcagaagtgacacggaagctgatatcaccactggtaaggaagagatcgacgaagaggaagaaatagaaaaggaatattacgccaaccatccccgcaaggagggtatcattttcaagatctggtacaagatcgccgactggtgcttcaactagagaagcccacaaacatcagattgctttcagaaaggataaatatttccctttctaatctatacagagcttgtagactaatgaatatttaatgaaaacgatactgtagatcaatgccgatcgattcgtgtggagaggacttggcaactacattccgatccagaattccaacttagcttcaagtagtaaacggttcctacgtggatcatcccagaattcggtgcatcgccaaaagttaatcaatagaaccagaaaatatttactctttcccataacagtaatggataatggaggaaaatagttgtttatggaactatctcttaccgagagcatctgcacgattacgttagacaatatgatttactttagatttagaaataagattaccatgaaaagttgggtctggggtaaatcagattgtccagctatactattagattcggtgcttttcgcaaccatgcacgcaatctcattgatcttgaaatgcgcccaaagcgaccgccccattctgatgtcgtttattgctgtttcgaaccaaaagaacggctgatgtggagaacctccgtctaatgtgaccttgtgtctgatccctgtcatcttatttcagtgtggggccagtctgggatgcaagcctctgtggaagctgttgcgactctattttgtggggcttagctacaggagaacatgcggcgaacaccaaaagccttgaggttgcgagacctagcgaatggcattcggggtagcacaaagccattagggctgaagcacagatgaaaaaacgggcgacaatgtcagacactacgacaacaatagcatacagtgtaggcggggtcggagtgccgggcttgtgcagttaatcagactatattggcgcaaattagcgggcctagcaaaggtatgctcccgggtgttgaaatgcgaaaaatgtaggggagttctgcgatgagccggccccaaattgatgggactcgctggagagcctgggtgtgtgcgcccgatgagatgatctacagcagcgggaatgttgtcatattgcctgtcgtggacatccagtgtgtgccatggaagtgtgctacagccaaccgtttttccggagcttctaacgtcacctctggaataattattcaccaagttcaggccaaaatatgattcaagaaaatacgctcaagccaaaaatactggcgtcctttagggaatccctctaccgaccctcatgccacataccaagcatggttgctgcggtttctgggcgtcgctttctgattgttctttcttttctttattgcttttgcccagcacgctggaccaatccttacggggctatttcatacgtagctaacagcagatatcataaaaccggtgcctaatttagacaatattgtcctctgtaaaagtgcagtagagaccagctgctgcaccgcattgggcaggtatttgctacgaatgggagggaaatgagataaggagctccagaaatgcccccatgatacaaaccgatatttgtagtgtgagctgttgcgggacctgagctacgcagtttaggcttttgcgatcgacttctctgcttctttttgcattacgtttttccgtcgctcgccgtacacgctggccgtttgtaggcagagtatttccgtcccgtctatagagcaattcacagctacatatccagtcgtctcgttcaaaacccagctggaatctcgcccaggagcagactcaaattcacgcccccgctgttatctctgggtatcggaaaattcacctctcctagcgctatctccccgacaaatcttaccaggctagccccctatacaaaccccattgtaggtttacgcctttcctggtggaaacgtcacggcacttggagcccaaacaagctttagtggtctttctcgaatttcttggctaacagttcagcctgcagaacggcggtgcaggaattccacaataggcacttgggaatttgctacgataagcatagttaattgggttcgtctcatctcgaacaatagctgatcgatttttgctggagattggcggagatgaccattgatatataaatataaatcctggagtagcaccgtagaatttgccgtttttttggttttccatctcgtagaactggactgtcccagccttagatattccttagattttgtaaagagtctctactagttgaacacagcctatcatgacttcgtcggacttggagaaaaactccaacaaccacaatgtccacaacaacgacttggtgtcagtggtttcacgtcacacccaagagtacgatctctacgtcgctaagtccactccctctaacattgcctttgaggacggtcaccagcttagacaggccttggacgccagacacacctctatgattgccattggtggtgccttgggtactggtttgcttattggtacgggttcagccttgaagtctgccgggccaggtgccattttggtggcttactctatcattggtttcgtggtcttgatggttatgagcggtttgggtgaagtggctacattcgtccctcttaacgggtttgccaattactgtcagagatacgttgacgatgccttgggttttgcctgtgggtacgtctacttgtttaaatatttgatcttgcctgctaaccagttggttgccggttcgttaactgttcaatactgggtttccaaagacacattgaatcccggtgtgtggatcacgattttccttgttatcattttggccgtcaacttgcttggggtcagattctttggagaaatcgagttctggttgtcgtgtttgaaggtttgtacgtgtcttggtcttgtcttgctcttgtggatcattgccttgggtggtggtccaactcacgaaagattgggattcagatactggaaaaaccccggtgctttcttgcactacgctgacgcttccaaagacttgtacatcggcggctccttgggcagatttgtctcttttgtctccgtcttggtcactgctgtcttcgcctacttgggtactgaattgggtatgtattttaaaaagcctgcacacattaaaagtgttgcagctttatattttttgatttgagttttttgcaatcgttgttgcatcggcttatcgtacatcttactaacatcttctagtgggtatcaccttcagtgaaactagaaaccctagacgttccattcctaaggccatcaaattgaccttctaccgtattcttattttctacatcttgtcgattttattcctcggtatgtgtgtctcagccaaggacccattattgttgtctgcctctggtaacaccgccagtgcttctccattcgtcatcgccattaaaaacgccagaatcaagggtttggatcacgtcattaacgggtgtatcttgttatttgtcctttccgccgctaactctgatatgtatgtttgttccagaactgtctactccttggctgtagctggatacgctcctaagttcttcactaagaccaacaagttgggtgttccatactacggtatcttgttgtccttcgctttcactttgttggcttatatgactgtctccagtggagctgctgaagttttcacatactttgtcaatgtcgtttccttgacaggtttgattgcctggtcctgtattttggttatccacatcagattcatggctgcctgcaaagctcaaggaatcgacagaaagaccgatttggcctacagatcgcctcttcaaccttacggctcctaccttgccttggccatctgtgtgttggtcatctttatcaagaacttcactgtcttcttgggctcgcctttcctctataagaacttcatcaccggttacattgtgttgccggtatttgttatcatgtactttggctacaaaatctactacagaacctcgatcatctcggcttctgatatcgacttggtcacctacagggatgtcattgacgccgaagagcaacagtacaagactgaagcagaagaaaaggaagctatcagacaagctgaaggcaaccctcacgacaaagattggttctacgagaagttcttgggctggatcttctaaggcatttacgactatataatacattatgtaatatacactaatttatttgttctaacctgagacacctgtaatgtaaatcgtgggacttttaaggtatttttgctaccatcacgattatagcattcgccaaggattacgagatctagacttcttgaaactccatacaccataagaagtcggttgacttcgtatatggagacaactttagatgctgaaggtgcatttgtagatctggccatgcaggaggagagtcatagcggagtcatggagagtcatatttgcaaatcttctaactcttctgatcttatcatctcgatcatcagacgatgagctcagggagaaggaacagacgaataattccacttcacttacggaaaagagcatccgttgcgtatgtcttgcaattgagaattatcgactacaaaatactaaccaacttagctgcgatcgatgcaaactgaaaaaaaccaagtgtttgggaggatttccttgcacgaaatgtaaactctctaaggaggagtgtgtgataactcccaaggttatagaggatgttctgaaggattacaagtatgtccatatcaaaagcatcgaagtacagtgtcgaatatactaactttgagaatatagagagttgtacctttcagtgaaaagctacaattgcaaattggagagaatcgttcagtatctctttccagatgcaagtcttgatatgctccgaaacaatattgacatgtttgagaagaaaatgtgcatagacaaactgttggtaccacagagaacgagactagaaggcaaaccagctgatggagaaacaataaacaatttcagaaggctgtttgtaatgacaacagatcgaagtttccttgattttattgagaacaatgatcatgttgtcaagaatgaggctgccagagggcaaagcttgaggccatatgtggccaatcctagaactatttcaatgttgtcttcagctataaaggaagctctcgctatactaccatcagatgaaaagatcacgatgtttgtccagatctttctaaatatctgtgaaaccaattatttctacgctattcatctggaagtgtatggaaaattggtcgatctctacgaagcaagacgggtcggagacttggaatacttctatcgagaatggccctttttggtaatcgttttgtcaatgctttcggtgtcggctggttttgattatattggatccaaattgcccatacctcaagaagaatacagtgttaatcccggatacaattactacttcgcttcaatgccctttgtaggtttcttattagacagtaaagctatcgaaggtgcacaagctcttttgatgttgggagtgtttttgactacaaacaagaatgaacaatttggattggctgatggaggttactcattcatggctttggctttagagatagctatttccaataaactttataccaaggacacatttagtcgtctacctgattacgaagctgaagccatgaagcgcctttggtggtcatgttacactttagagagaagacatgggttcaatcttggaaaaccagagttattccgaatcgaagacatcaccgttggattaccagagtacagttttgaactaaggaataacagtggctcgtcaaaccatctcaatcaaagagtagtgattcagttaacaatggttttcatcaagctaactaaactagaatacactaaaaccacctcagctaatagagttgaaatcgatacaaagatgatcagagcactagctgacgatgtggaagaatgcagagcaagcttcccagaatacgctttgatagaaaacctcgatccttcagcggacttatatagaggtaacgtccatctccatttgaactactaccttgcaaagatctacatcggaaagccgtttttgctttacaaagttgagaaccaactgaaaatccaagaaaatagctacgagactgctattgtcgatcacttgtcttctatttgcatcgatgctgctttctgctctattgagctactcagcgttcttgaaaaaaactctaaattggggcaattttcctttaccgacctcaacttttgtaatatttcactttttgtcatattggtgtatttgaacattgacaaatctgacaatacacttcttttccttctgaaagggttaggtattcttcgaaccctttctcgtggttcagctacagcaaagctgtcattgaacaaacttcaaaaatttattgacttagtctctgtagttgacacaaagactacagattctagccaagcaccgtatgctcttgtagatcttgaagccggaggaatgggctttcctgaacttccttcagacattgatggttttctccagttggagaattttgggttcatggacttcaacctatttgattccggtctggtcttgcaagatatatctgaccatatagtatgagtgcagagcatcgtagacttattcacttattgtacaaaaagctctatgaaaggagaagtgatacactcataaacttcaccaataaacgtatttctacatttctattaagaccatttaagctattcgacagaactatcaagaagtcacttacgagacgttccgaacaattctcgcattttacgagaatcgtaaatgattgcaaaatcgcatctgcatgcgcagagatgacaaaaaaaatattaagaccgttttttggagcaatatgaaaaagtaaaatgcttcaattcacttttagtttaatttccgtctaatctaattcatcacaaccaaatacagtcgtcatagatgatcgtgataatatctccgtttcacatttaaagacattctcctttcgcatacaacttttgcatggatattaagcacacacaaccgacagaatggtaccttcagaaatcatagatccaatgcccacaagctcagacgaacttgaagtacttacgaatgtgacttccgaagacgtaactgcatatttgaatcaaatatctccatatttcaaagtagataagacaaagtatggaggcagagggtgtttttcatactctgaaataccagctggaacagtgctcttaacttgcgagcagtcgttaagttcaaccatagtaaaacctttcaggaaggaagcatgtactttttgtttctcgtactacgatggaagaatcctcaagctgaaaatccaaaagaagtttggtaaagatgtagtttctttgttcttctgctctgaaaaatgcaaggaacagttttgcaatcaggacatagatgatatataccaggattctcttttggaagtggaaaaacattatatcaatggattgaataaacatgaagaagaactcaaagaaccaccaaagaatatggatttggacgaagtcattaagcaggagtgggtaaacgtttcattatgggaaaagaaagtttcatctacaaaagcttccaaaagagccaatatgatccccagaatatctgatagtgaatacatagaaatcaaatatgtcattggagtcctcttcaagttgttttctaatgagaaaaaccagaccacattgagtataaatcaatatttgcatgaattgccaagatgtgaaagagacctctttgaattgaatcttttccgcattttacaatcaactgagttagaaaaggtacacaagtatccgtatcttttgtattcctatatcaacatctataaattcataaagctaactgctctacctccattgcagcctttcatcacttctgatttggtgagatcttccatcggaagaaatatttccaatgcctttggcatttggtccgattccagttcttctgaagaggaaagagaatactttggatttggagtatacccatctgcatcttatttcaatcattcatgtggacccaacgtagttaagaaaagaatcgagaacaaattgacattcacaaccttgagagatatttcagctggtgaagaactctgtatcgactacggtaattacatcaatgaaccggtggaggtaaggcaaaaggaattgagtgaatggttctttaattgtggttgtgacaaatgtgttgctgaacttcaacaattgtcttcatgaattctataagcatctataatagttcttcaatttactacgtaattcgttcttcaaagtgtaaaatcgaaatcatggtagaactttttgaattcttcacaatccttcgattcttgtagcattggctgttgacatttatcccagtacacccttttcggcaagttcaagagatgtgccaacactcgtctggggaattgcaaatctactgatttggaagaatccgtcaaacgtgcaacaaagtacattttatcattttcatccagataaacagtgaacataatataatcgtattcgttaattgtttgtattaagccaggatccttttcatctttgtaacttttaaactcgagtttatggtttctttcgtagcgttcgttgttggaatgtgctttgttctctagagtctgagaaaatttatttagaaagtattcgggaattggcacaacttgtacactggcatggacgttttccaatctattaatttcaaagaaaacaagacggtagaaagggttgctcttcaaaaatgccttaacaagtgagttttggtactgtaatatctctttataaattggcgattcaattacattggatgttttctctcgtatggatgcaatatgttcaatgggtaagatgatagcatggccagggaagcgcaaatgtttatttggccgtgttaatggtcccttagcaatggtcatgtaggtatgagatgcaattgatatgatcatatgagtctctgtgtttgggtttgagagacaaaagaaacattgatcagaagtgactttcttagccttcttggggacgatattagattgggtaatttctttaatgtccgtttcatcctcagcaggtctcttttttgacacaaacggtacatgtaccgtcgtgaaaggatttgggccaacctgtgtcccaacattctgcggttgaagacccaatccaaatgcatagaaccatttttctcctgaaccttcttctcccaaactgatgaaacgcgtaaattcaccagattcccacttgaaaggcttgtattcaaagaacttgccgcgttcgtttcccacagcaaaatggtatcttggttttgtttctttgacaacttcatcgataaacgagtctcctacgagaagtagtttctcttcggctgcaatagcttttggccaattgtatgttactagtatatctatcttcgatctgttctctctaaccaataggagagcttcggatttatggtcatccaattcagctcttccagcaatcatcatcactactacgcccgattgtaatttgaagattttcactaacagtttcagcattgtaaagttcgctttgatgtcaattaaatctgaagaaccattttgctcattctcttcaataacagactcgtgaaatccatttttaccctcagtgaaataagcaggggcatttaaatctgttgctggaattgaagatgccagactaggaaggacatcaccaaggagaagaatggcctcaaatgggccgtttttcgagttctgaacattagccttggccaagaccttgtcaagattgacaggcagtggattcaaaaccaagaacttggatttgtcagccattttttgtacctaaaattgttcgtagctcagtatattttcgtagtaaagcagaagtgaaaagttacaagttaccagaatctgaaatcgatgagattgagctggggaagcaattccgaggtaatgtattttgacgatattcacgtgatgtaatatattccggtctttttgtttacttttcggctcgcagtacaaattagtatttctagaactcacgaattgttttctttctaattgaacctcataatcattgatttccgtttcgattttccagacagtcatgtcaaattctaaaggcaccaatattaaagttttggttcgtgtgcggccgcttttgccgcgtgaagaagccctagaagatgagtcttccaagcaatgtttaatcacaatgcctgtagagagtcctatgactacgattctaaaagtaccaaccacatctactttccattcacaaaagaataaacaaaatcgtccagggtcgccttcaatttcagaagaagaattcaaaaagtacacctttgacgagtcgatatggtcttttgacagacatcaggataactttgtagacaactctgccttctatgagaaaacagggccagatatcattaaccactttttccagggttacaacgtctgtctactagcatatggacaaacgagttcaggtaaaactcacacgatgatgggcaatagaaacgaccctggccttatacctttgatcattaaagatattcttggtcaaaaagagctattaattaacgagaaaatcaattgcgaagttaagatttcgtatatagagatttataacgagcaggttaatgatttgcttggatcagaagaatctaccaaatgccgcgtaagagaacatcccataacaggtccgtatgtggaaaatgtgaaagatttcattgttaatgattacgacgatttcaagaacttgctaaacaagggcaatttaaaacggtctactgcctcaacctctatgaatgacaagagttctagatcacatgcaataataacattgactcttaagcagaccaagtttgctgacgcggattcgtcgttagatattggtgatgctgatgaggaaatggtgtcgaacattaaattagtagacttagcaggctctgagcgtttggctaaaacaaaagtgtatggacagcaggacagaataaaggaaggaactttaatcaacaagtctctaagtgtattgggaagatgtataaacttactctctgccaattcttcaaacccaaattccaaaccagcacttgttccttaccgagattctattttgacataccttctcaaagagaatttggcaggtaattcgcgtagttttatgatcttctgtgtttcacctatagactttgaggaaacgtaccagacccttaattacgccacacaagtcaaaaccatcaaaacagcagccagggccaacaaaactaagttgtccacaattcctgtgcaatgggatttgttgcgtcaaagtgatcaggatgctatcacttctcttaaacaagaggtccaagaattaaccgacaaattgaaaagaatggaaagctcggaacagacgccatcgctggcgagcgataatttcaataagctaataaactacttggaaaacgagacacgcagacttaggtttgagaacaagtatttgaaaaatcagttgaataagaaagataaggaagtcgaagagctcaataaacatgtcaactacatcgatcacgaatttgacgaatttgcctttcagattcaacagatccaaagtgacagtgttagtcaagagaagaatcatttacaagtgaattgtcagacgacggtcgaagagcttgagaaagaactcgagatgtttgaccccgttagggcattttagaaatatcacaaagatgaagatcaataggtgtgaattggacgaactagtcagataacttgacatcgtctagcttattcgtgaagtaaccacttatatttccacatataattcacatatcgtcccaaacacatctaattgagaaatgtggacagaaaaaaaactcaaagtagtaacaatattgaatagtcaaaaatacacaaacctgtcctatctcctgtttcttctccactccatattttctttcccgaacctctcccttgtcaccttacaaacattcagcctaacatattggaggaccctggatgtcatacgttcctatcaatgtcctgcatgtacacttttttttttccgcgcgcacataacatacagcgataatatgcctattccattttgccccactgaaaatcacacacttgacatttttgaaccactgattcttttatcgagatttctgagttaagtttctttcagaaagatttatagaatccgtacgactttcacagttcagcacagaatggatacgattcccgtctttggatcctcggttcaagaggccgtacaggccacagttcgtctcggtaaaccactctttgtcttcttatcggtgaactcggaagagaatctggctacgttcctcgagcagttcttccacagccaggaggcaatagatagcgaaataggacaacttgtcacggagtcatttgtgacattgaagcttgtagaagacacggtagagtttggctatttccagcagatattttcgaacttgattgttcctagcttctatattatccagaatggaaaattgctagacgtgatttctggagagaccactgaagcacaatttgtcgaaaaagtaaccaatgtaattatagctgaaacaaaccaaatctcaacaggtccagaaacatcacaaactgatacaaatggtgcaaatgccgctaatatttctaattcttccatttcatcggttcctgctcctaacacagccacacaaatacattcagatccagtatcagatacatctgcaacaaattcgacagtcgcaaatgtagatctgccaacagcttcttcatcttcggataaccagagacattctcaaagcccggttggacaagtggaaactgtcaaatctaccaagccacaatcagcccatgacagaacagcttcggagtaccataaacaatatctagcttctagaaagaagcaggaagaagagagactcaggcttcgagtactccttcaggcggatcaaaaagaaagactctcgagacaaagagagatggacgaaattcttcatggttcagaatcaacttctccacagcccaaatcacaatctccagcacacccagcacaacatgatgtgtgttttctctcaataaagcttttcgatggaagttcattgaagcacgagtttctgtcatcagatacattgaatactgtaagggagtggttggataaagaaacagaaataatacctcccacagactccctaccatcttttgcaagctcttcgtatccgcagcctacaaattacgcctttcaccgcccgatattaccgagagagacttatacagatgagcaagagttccagaagcttgttgaccttggattgtgccctagatctgcattgatcttgaagcctatttatgacgataagtacctgagttcgtatcctaccaataagacttcaggaggtatattgaggggtgtaggcggaactttagccagagtaggaagtgctttatattcgttctttgattatggggtagatgacactcaggaacatcagcatcaagactatgatgaaccggatggttccagaagtccacgtgatcccaccagtccttccagaccttcagctacagcatctggttcgtctcgtgtagatttccctgtgagaccaccattgttttcaatcgacaataacgtgccttcatcgtcttctctcatcaacatctcggaacctgcgaacaacaattcgtcttcttctttacaacaggaagggcctacgtcgttcttcattgacgagtctaataatccttcagtatacaacagtagagcctcaacacccaaaccgttaggattgtcgctgattagtagagtccagactattcatgatgagcaagatgataaggacaagaaagacgtggatacatataatggtaactcagtgaaccttcgtggaaaggatgatgaagataagagaggttaattatggtgtatgttcatatatatagttctacgatattcatgttttcacatttacctcaatgagaaaatatatatgagaagaaacaaagttatagttgtaattaaagtcagatgagtgaagacctggagtctgctgtagctataggattgagcaaagaaattataggctgcgaaaaattaccaacagaatcaaagacaccaaaatcagcaagaaaaactagtagcaaataaacgataacacacaagagaaataagtataaatattgccacattcacaaagtgttcacttcttcgtttacgacaatttttctccatacaaacactggcaccaaaatccaaatctcatgaagcctcttctttatctctatctccaacttttgtctctcctgtacggctcaagtcgcatagattagattatctgagaattttcacccaaggatatccttatttcttcaaatatgcgatatatttcccattatctctaactcttctaatgaacgacttgaaatcaatggagaagatcaagatctccagcttggagtcgttgcttcgatttccgggctattcacagttggtttctgatgcatctgtgcttacatgtggatgtctcgcttcagagtctggattttcaattgataaagtcaataatagtggcaaatgtcccaattgcaatacagaaaacgtctcaatactcagtgaaatcaaaccacttagagacctctttaagatagttcaactgttgaactatcaactcacgtcacagtcttcttcttcgttccagacttcttcgaggagaagaaggtcctcttccaaaaaaagtgtgagaggaggaattgagtctgcaatagctgaaggatcttctgcttctgactcaatggattttattacacttttctacaagtttgccaaagaagaggatcaggcatcgatgcctgaaaagccagcatcgcctgaccatgctaaggtacagcctatagcgattcagcctggaaaggccctggcggacttgcctgtagcaaattcttcattgcctctgtaccataactcgacatctctatcaccacaacataacacgcctaatttcggtctagaatcaagtttccatagagcagagtctactttcaataccaacaacttgatctttgatgagtcacttgtaaagagttacagtgaagaaaaagagtacaacttctcgaaatgttttccttaccatcggaaactatctacatttgctacccaactgagcaaattgcatttgtcctttaagctgggctccatcatcaagcgtaattttataggcagtaacatccacacctacttggacttcaatattgggaaggaggtgacgcgttttgttcttataactgagaagaagtgggaattgtacgagtacgtagttccaatcagtggctcggacaattatggagtcaaaccccagcttatttgctgtgggaagctgacaggagagtatggagacagtagtagtagtctcaatctgttcaacggagcaaagtcggcgactggcgaaattgtcataaaaaacgacttcaacaccagcaatgatggcgttagtacttctgactcagatttgaaaaagaaactccaactgtgggaccatttatactgtcgtttgtcaaagaattatcttgtcatatcgggaacaaaaggcatgatgagagtgtttaacgttaatagaatgtcaccttatcagtttggtcagcctgtttatacatacatcaccaacttccccataagatgtatagctatagcacctaatgacggactagtagcgtgtggtattactgccagagaacggttatctggaaaagaacagccattcatcatcttgcatagactcttatcctcggaggacaattaccttcaccaagtcgaccccatcaccatcactataccttacagagatcccattaaaatcatgcgctttaatcttacttctacgcatttgctatgttgcacggcctgggagtcgcggtacctagtgattaagcttagaagtaccaacgaaaacggtgaaaattacagaagaccgcgcatgatatggtctgatacaacgtacaagagtaaaagattcagaagtgatgtagagggtgaggataaactagccgaagaaacagcagatgccgactacgagttaatgatgaccaatgaaggcatcactgatttgcagtttggagcacttaactcgaacaccgtggtgatctcgtcatgctcgctaaagagtagacccccagtagtaatccggttggatggagcgttgatagactctatgaaacaccatacgttttctgacaattacagtgtacagaatagttttaacagtatggaagatgaagagtatagcagtattaaggcagcagagacggtcatgaagatatctgaggtaggatctttgatccatggattctcactctctcccagaggagatggtatagtcttcttggacaaagatggccgtctctatttaatccctacccctaaccttctgtcgaagtctactacttctacctctggagcaagtaagaaggtggtaattctccttggagaggtttcaaatgccgaacgtttcacagaagctgcagccattaaattctcctctgatggaggtaagatctttgcagttgacagaaaaggtgtattttcggtttttgactttactaaaggtgttcctggcgaagaccttgatgtggttaagtgtaagattcttacattctaagactatgtatgcatatttatgaataacacatctaatgactttttccaattcattttattctccttatcggttaaaattggcacaaagttgcgattgccctttgaagcattctgtaacttcacctttattatccaccatcagaatcataaattgtaaacttttcgcagctaccgccctgcggctcatccattccatgcggcagttcctgtacattaatagagccacagtagtggatttttctgatgagcaccgtgtgaaaagtcggtatcaccagaccttggcgatgaatctatcagccaattatacaattcttctcttagaaatagttgctaatattggagctgtagtgttttgtaagaatatccatacaaaaaaaagctacaatttttaacgcaattaagcttctgagccatttgccgtactacctcatctcagctagtctcagaccagtctcattttatttgtgtaggcctataatttttcactagttcaatttaatttcattcagaagacttcattctaaatcgacaacaaaatgtcttcagttccaccattatatgaaaacgctttggatctcatcggtaacactcccttgatcaagttaaacaagatcccccaatcgtatggtatcaaggctaaggtgtatgccaaagtagagttgttcaatgctggagggtccatcaaggacagaatctccaagaacatgattttggaagctgaaaagtctggaagaataaagccaggttacactttgatcgaacctacttctggtaacaccggtatcggtttggcacttgtcgctgccgtaaagggctacagaaccatcatcactttaccagaaaagatgtccaacgaaaaggtctctgtcttgaaggctttgggtgctgaaatcattagaactcctactgaagctgcttgggatgctcctgaatcgcacattggagttgccaagaagttggaaaaggaaattcctaactcagtcatcttggaccagtactctaacccagccaacccagatgcccattactacggaactggtttcgagatttgggaacaaaccaagggtaaggtcactcacctcgtagctggtgcaggtactggaggaactattaccggtatttccagatacttgaaggaaaagaacccaaaggttgaagtcactggtgctgaccctaagggttctatcttggcccagccagaatcattaaacactagtactgaaggttacttagttgaaggtattggttacgactttattcctgacgtgttgaacagaaagtatgtcgacaactggatcaagacagaagatgctgagtcattcaagttggccagaagaatcatcagagaagaaggtatcttggttggaggttcttccggctctgctttgcaagctgctttgcaagtagccaaggacttgaccgaagacgatgtagtcgttgtagttttcccagactctatcagatcgtacttgtccaagtttgctgatgacgaatggatgaagatcaataacttcgctgtagatgaaaccagctcgtccggtaacaaatctgatgacttcttggccagcaagaccatcagggacttggttgctggtaaggctcctgtcgtcactgtcaccttgtctgacactgttggaaagacctttgacttgttgcacgacaacggctttgaccagttgccagtgttgaacaacagtggtaaattggttggtttggtcacattatccaagatcttgaagtcgttgtctaccaaaaaagttcaattaacgaactcgatcgcctctgtcattatcgacttcagaaagttggctgattttgagaaatcattcaccatcgccaaggagtctggatttactaagagatcctacgagccaattaccttggatactcccttggcattgttgaataagttctttgaaaccaactccaatgctatcattactgatgatgaattgaagccagttcaaatcgtcaccaaggtcgacttgatctcattcttaaccaaaaatgttgctttctaagtgaaagaaactaagccctggatgagaaactaaacagtataagatatacattcttgaagactcgtatcttccaagattcctttagaagtcttatatagctttagatgtaataattaatataatacaaatacaaaagagaatgctaatatgccatgaccaagccggagcaacactataccgaatatagaatgctggtacaaaaatttatgtaaattacagcgacagtaacaatgaggttactgtcatcatcaacaagtgtaacaagtctctatgagaacttccacctatttccacagttctcacaggtacagaacgtagtcaaaggttcatctgctgacctagtttgcatctggtagtacgacactttcttgtgcttacacttgccacaggtgaatctgtccgtaacagctctcttttcggtggcaccttgggcatcaaacaagttcttcttgtgcaatttttcaatctccttcttcaaagcctctggagccatttcgttaggagacatcttgatgaactctgctggtttgattcctccagacaacaatctttccctcaactccgggttctttttgttgcgtagattcatggtaaaagttctcaacttgtttctgtagttgtcgttgacattcagatactcggacttgaacacttcactctctatttctctggccacgctcaagatatgcgacagacgatcatcacgttcaatagccaaagcagtataaagtgcgctgacagatgcatttctggtactgttatcatacaaagttgtgtttactccatcagtcttggggttcctgggtccctggtggaacttgctattggtagaaccggcctcacttttcacttcttccttgactgaacttgcagcatttccatttgaaacaggcgaggccgtcttctttttgctgtttttctcattctggacagattccttccatgtgcggatcatcttcttgaccaacgagttgatgtcgctgttgctgtgggatctgtacttgttaacagcgacaccaacctttgtttccctcaacaatttttcagagggcttgactccatcattcaagatgttcaagagcttcaaaatggtggcatcgtctgaagctttgtcgagattcagcactgtcgacttgatttctttagtgtccatagtgtaacggaagacgtgaagtatgaatgaaagacaaagattagggtatatttccagttatttgattaaagatatatttgttagattagttcgaaatctttttctcgtgaggcagtctgtacaggacattgaattcagtcaagagctgaactggagaaaaacgaaccagtctttctattagagtatactgtttcttcatatataatacatttgttcaagaagttattaaaggatcctataaacggacgtgttgcatatggtagctgatatctgattctttattcgcattctttccataaaaacttaatattaaaattttcatatacttcttgcgattcttcagtttcataaacttataaagcacattagtaatagaactcctattagaagaggagtcatttcattaacaaatagcattaatagtgtcacatccactgaactgacatacatttccacaaacttcatatcattatggactctacaagtacaactgtatcaatagggaagttcccctttgactatactgaagaacaggtactagaaatagccagatctgtagggccagttcttgatttgaagcttctttttgacgaattgactggcaaatctaaaggttatgccattattaactttggagacaacgaaacggcggcttcagcagtgagaaacttaaactacatgactttgcccaatggcagattcttgagatgcactttcatcaacgactacgacatttcaaaccaggaaagattgcctcctttacctttgggggtgcagatccaccccaatgagaacctgcagcaggtgatatcaaacatcttgtcgagtatcgactcgaattcagccctccgtattctaaaagaagccaagactatgagtacagagaatccgaaattgaccaagttgcttttagaaagattcccgcagttggcgcacgctttagtggaactcagtttgatctctaacattactaatggggatctaatcgagatgactctcaacaagaaagggttgcctttgaacgaattgtcattggaccatataacgttgcttcggagtgttcataacctcactgataaagatattgcaactttagatgagagcaagaaagacatcatcaaccagatacggaaggaaatagacaagggatcctacggcgaggtgttgcaagaataattgttgagtttacatatgacagtcaaaaatagtagtggaacagcagcaccactacagttacgaagttcgagaagattcagttgaaaggaaacagtaatgcatcgcagaattttgaaaaaaaaagatctgaaatctatgtatagtagtacgtaaatacttgtaaatataggtacaaaataatgctgcaagattgtatggcaacacctttgtagaacacagcagaactaacttgaaaaagcacatgccaatggcaacttggtctcacatctatttctgtatcttgctctgttaaagcatttgtgctctgtctgccggttttgggaaattgcgaccttccgcactgtacaattttaactatgcgattatagctgcgatttcttgcgaacctcaacaatttctaccaccaattgctcttcacggaaagaagaatagaagaatcgtttcataactatacggaaacgttggacctggcaatatgaggagatttaaaaaaaacgtgtcgtttcacctctcgcccaacagtgtcatcttctccgttttgttggctcatgcaatatggctttacaggatttatcacatgctacaattccttgcacccaaaagaaggtgcaccatatattgatccaggtacagttcactaacagcctgaatcttctcatatctgtataaatagaggtctgctccaggatataattacaactggaaaagctaacgtagcctgaaacttcaattgaccaataggtgcaagaacagttgcgattctagctacaatacattgattccaaacatgactgtcaagaaaacgagagaagagattatggctgacttcgagaacgagcagcttcgtatcgaagccatggagctccacatcgacggccatgacgacaagcctcttgtttatcaccgcgagatggaagacatgccccagagacttcactttattcttcctgaaaactgtgtctacagtgttactataaagtacaaggtcaagaaacagcctttgagaaatctcacctacaagcagatggtgaagaaggctggaatcgttgtcaacctgaggaaactccatatgggagacgaagcacatgtcaacattgaccaagacgaccatactcacgaggttacgttccctcctgacaatgttcctggaggtactttcttcagaggtaagcacccggctgtgagcacagtatatgctgacggaaaagaagtgtggaagactaaatggtacattgagattgttaaggaaggaagtcttcccgagatcggtgggtactaagtatgactttaatgtgaaatggtatgtaggtatgtagaggtatatagataaatatagggcttaataaatactaattagaaatagcaaatgacacgctagtagaaggacgctaaaatagtgaacaatatcccaagcagcacctacttcacgtcctgataacactaagtgattctactcaaaatgaagtggagagaggtcaaaaaaggacgctgtagctataagctggaaatagttttcgcaataatttgactaaaagttctaaaatctggcaatacacaattatcaattaacgaatcataatatacgagacaaaaaagacaaaacgatagaagcaaatatacgagccaattgcctaaccattacaagaaaacagagcagagaaataatgggattcaagtgaattaattagttgtagtgtgactatggctgcaacgtcctgtatgtgctctggcgattttaaatatcgggatcccctgacaatgggagccaccggaaattatagactagtgtatctaaattgttgttcaatggcacatcctgaaaattgtatacgttcacaattataccatctagatgacaactctcttcttccgttgctaccacacattttgtaccgaaaaaaacaccgttccctcctccccttgcaggctctatctccacatccatcacgtgatgataaacccgtttgtgccactttccctataaacgtcttagtcacgtagcattctgtcagataagcccacatattcttcttgagaaggagttattctttctaggcaccctattagatcttgcttcttaggattattcgtatacaaccatatatgcgtatctagcgggggcaaatcacagaaaacgctggcaaaattgaaacttttacaccgctctttgctccatacgtaaccaccccagaataggcagaattgtcttattagacccaacaattctacgaataccctcagttacataaccacaaagtattcgcaacatgagctcgcctaagagacggattgagaaggatgtcatggagctcatgatgtctgaccacgatgtcacgcttatcgacgactccatccaacagttctacgtgatattccacgggccaaaagatacaccctatgagggaggcatctggaagatcagggtagagttaccggaccagtatccgatcaagtcaccctcgattggctttaccaacaagatctaccaccctaacattgacgaaggctccggctctgtgtgtctagatgtgatcaatcagacttggtcgccgatgttcggactcttgaacatttttgagaactttcttccgcacttgctacgctacgcaaacccgagtgatccattgaatacggaggcttccaacttgatgacaaaggacgaaccgaagtacaacgagactgtaaagcagtacgtgcaacagtacgctaagcatgtagccatcgacaacgacaatgatgatgacgatggagctgacgacgacgacgacgaacttagtgatgtcggaagcttatccagtgatgatgaagacgaagaagctgctggaaccctagatttgtaaccgttgggtaccagatacgtacttcgttacctaataggaactgaaactgaggttcatagtttttgttcaatggcgatggctgtatcagcccagaagctacgtttgttatacacatatagaactcatctagcataatataatattgattggaaagtacgaaaaaagaccataaaagagacgaaaaatctaaccaactcagttgactccctatttggagattctaactgacttgtctattcttcttgggaatcgtaaccacaagcaaatcatattcagaactgtgtctatcagacttccacgagatgctgctgtgctcaatttcatcgtggtcaaatatgtatgttcctgtttccagctgctgagaagatcctaccacaagcttaagcttattattacgttgtcttactaagcgcatttcgaaatcttcaaaattgtattcgctctcgccttcacccttcaaacgggtaatggtgatttcatatttgctcggtgattcgaatgtattgaatctgaacctgccatttggaaggtgactcccagtgtgttgaatcagatatgaccttctatgaacagttgacttgactgtgcgaacaggcaaaactgtggggatagaaaccaataacattatgaactgaaactgaaattggagagtatggaaatccagtagaaattataaatatatatgtatcaatataatagaaagctcctttcccgaaacttcttctttccagagtatttatagtgtggatatgagggcaaatgatgacttatctagaaagttccacgaatgcgcctacatgaatttttgttcgcagccaaaaaatggttgcaatctgactgcgcaatttttatatttcgtttctattttataaacggattctttttggtatccttcaagaattttcatactactgggatattcttagctaaataatccaagaatttaggcttggttctaccttggatgaggtcctctatggccgagccatacttgatcaattgtggttctgcccacgctgtctgcataattcccaaaccgtaaggcaatccaacactggtctcattcacaggaatggttatcattgggtatcccgccttggctgcttgctgatatgtgatagagtggcccgatggcacaagcaaaccgtccaattgaaagttctcccctgttccagaatcagtgtagtttaaagcgtagtcaataccctcgtctctggaagtgcggtgaacaaactcaatggcctggtaataggtctcattcttgattccactccattccaatgaagccaataacccatcttggccagattcaaaagcaggatgcgtcccaggattaccaccttcagttccgtcattagcgtagttgtagtctacaatatcttgaagtgacctgatcttggtattctcaagctccgaaagatagcttgcaatattgttgaagaaatcaaccttgacaatggtgtactcagactcgttaacacttccgaaatcccagttccagccatcgtcggaaatgacgtccaagttaccaaagtcggtgttgttgtaaacagttgcgccagcttcttcaatcaacttgattgcctccaacaaaccttccacttgttctggatctgctgacgaccagagtttagcccatggcaaaccaaatttggctcccttcaaagcagttttgtcactcaagaacttcaagtagtcaccgtcttcaggaacttttccaacttgtgccaaagtgtagttgtctctggcgtcaactccatacatatactggaaagcgtatacagcatctcttacagttctagcaaatggacctgtagtatcttgatgttcagattctggaattacaccagctcttgaagtgagtccaacagtaggcttgaagccaactactccattattaccggccggagagatgatactaccgtcagtttcagtacctagggcaaacataatcaagttggcggcaacagatcctccggagccagtagaacttcctcctccattaagagtgagattgtacggacatctagcttgtccaccaacagctgagtaaccttcactgtaagagtttgatctcatatctgcccattcagaaagggtagcatgaccaaagagaacagccccggcttctctgagcttggataccacatgggcatctctgggaacaactgaacccaacaaggcattggaaccacaggtggtttgcatcttgtccttggtagcatagttatccttgacaagaaaaggaattccgtgaagtggtcccctgacaattcccagctttctttcattatccaaagtagaagcgatcgaaaacatgtccgggttcaactgaagaacaccgttgacaaagtcgttgatctggaagtatctctctaagtagcattgaaccaaatccactgaagataacttcccctgcgccatgtaatcttgcaactggtctatggtagcttcctcgagggttatacctttacattcaggcatcggaaagagctcagcactctcagtctgtgcgaagttatatgtggtatcattaagtgcctgagactcggcaagaacatcaaaagtggatcttatggagtaggaagatatggctgcaccgttgaccaacgaagctatcacaaagacaccaagcgactggaccttcatcgttttagaaaactgaagataatatcaagaatgtttgaagtaatagtacaactactatgctccccgagagatacacaattattcatggctagcaagtctctatttatataatgccggtcgatatcattgtcctatcggaagaaaatcctcgagctatatctaaccgttatcttgcatgaagagccgcgattgattgcctaaaccaggtctctgtataccattttggaatctgtcaatgcatctaatttgaccaacttcccgattccgggtggatatttccgcataataaaggggtatctctttcaaattatttctgtgcaatagaggcccgaagaagaagaaggtagagaaatatgaagaattacttgaactcacaagaccttagtgaattgcctacacacaaaatggaatttattagagaatatgcatttacctctctttattcttgagagataagcagaacttgaattgaataatttgaaatggtaacaatttatatatctagaggaaaatgtcgaaaagacatgaatcatttcctcgatctgaatttttcattaatttagaaataatttttataaactaattttacaataagaaagaaaatctggagagtatgatccactgatgtttttttgcatctctcattccttgctctgccaatggcttgaaataacaatagtaggagcaaataattactttaactttcaaagtcagatcccagaaccactatttagcacagaagaatattggtattagtgtacaggaatatctagagtccatttttcagttttgctaatatatggagctatctctttttctcttctagcaccacacatcaagatgtctgtaggcacagaaataaaaagggaagccgaggagaatgtagaacaaccggaagccaaaaagaaacggatttccaatgacgatttgttcagaagatccacccaatttgagatctggtcatatactcaagaatctctagacaagaccaagcgggctgccaatgctgctggagccaagatagcgacacagaagttcaacgaaacatttgaaacaatcgaaaaggaacagcctgaagtttttcagacacataacgagactttgaataaagataagttgcttacattgctcagtttcgaagaggaagcaaagtacttgaattactacacgcagaatattatccccatagccaaattcttcaagatgcccacccaggtgaaattgacggcagtgtcgttcttcagaaagttctatctttccaattcggtcatgcaataccatcccaagaatatcatgtatacgagtgtattcctagcagcaaagtcagaaaactatttcatctctatagattcattcatcaaagcgttgaaagatactgaagctaaagacattttagatcttgaatttatcatcttgcagagcttacagtttacattgcttgtgcaccacgcctttcgtccattgtacggattctttcttgatttccaagctgtgctattgcacccatccccattgatgtatgacgtatcggtcaacacgttaggaagcttatacgataaagcaaagacatggctaaacgacaatgtggtgcttagcgaggtcgcattcttatttactccaccacagatagctcttgctgccatgtatgaagtagataaaagaatcacagatagatacttgaagagaaagttcttgaaggaacaccacgaacttgatgctatcaaagaagaagattctggagttaagaaagaagattcggaagtaattgagaagattgaaagtaccgaaagtgtagaaaacggcgaagacaagaaggatggagaaaacgaaacagctaatgagcacaaagaaaagtctacagtggagagtcaaagagagcagtatgagactttagtgaggacaatcagaaagtgtatcaagatagcgaaacaggttcagacatcctctcgtgaagaagtgaaggagattgaccgtaaatgcttctatgctttgaaccctaagagattgatagagaaacaggtgaaaaaggtcaccaaagaagccaccacttcatagatgccagaaactacatttctcaagaaacgataactttgataacgcaaaatttgtcatatttggtaaatacatagatgtatatatttctgtaaagacagggaggaatatgtttagccaattatatacaatagggtatggtgttaatgctcttcatgataattattcgaagcatcttttttgaagtccaaattggtgcagccgcttagactgattagggtgcggaaatgcgtccgatttttccgtaataatggaattcacagccattgaatttccaaatttcaattcctcatctttttcccttatccttaaacttccttcctttttcatctatgcaagatgcttaaggtattcacccgactggctctgtcgaagcaggtgttaactcaattcaagaataaggaattgctcaagttcaaaggatatgtgaatggaaaatggctagaaagtaacgacaaagctactttcaaggtatacaacccagcccaaaaagatggccaatctgacgaaattgctgaagtttactctttctctccagaagagtacggtacagcaattgaggctgcccagacatcgttcaattccttcaagaagactacaggaaggtaccgttcagatttacttttgaagttgtacgatttgatgctcaagtacgaagacgacctagcaactctcatagttcttgaaaatggaaagccgtatgctgatgctcttggagaggtccgatatgctgcttcgtttttccaatggtttgccgaagctgcaccgcatgtcacaggagatgtaattcaatcagccaatgcctctgctaggatacttacaatgaaacagcctattggtgtgtgcggaattcttacaccttggaactttccctctgcaatgataacaagaaaactcggagctgcaattgctgtaggatgtactagtgtgatcaagccagcttctgaaaccccattgtctgctttgctgcttgcctacttagcccatgaagccggctttcctccaggtgtagtgaatgtcttgcctactctggaaacttcaatggtaggaaaatatatctgtgagcatcctttgatcaaaaaggtctcctttacaggttccacgaatgtcggtaagctcttgatgaatcagctgtcgtcgacacttaagaaattgacatttgagttgggaggaaacgcgccatttattgtctttgaaggcagcgacatagacaaggcagtggatggcgcaatcaaggctaagttcagatccagtggacaaacctgcgtttgtgccaatcgtatctacgtccacgaatcgatatatgacgatttcgcagccaaatttgtagaaaaggttcagcaagaaaccattcttggcaatggcttggatgaaaatgtaactcatggtcccgttatccacgacagatctcttgccaaagtcgagcaccacgtaacagatgcattggataaaggtgcaaagcttcttcttggagggaaagcccgccctgacataggtgactactttcacgagttaactatcttgggagatgtcactgaagatatggccattgcttctgaagagacatttggaccagtcgctccattgttcaagtttaagacagaacaggaagttcttgaacgtgcaaatagtgccgatgtaggattagcaggctacttctactcaccagacataagccaagtcttcagagtcgcagaagaacttgaagtgggaatgattggtgtcaacactggttcaatttcagaggcagccttgccatttggaggtgttaaggagtccggtttcggtagagaaggttccaaatacggcttgagcgactacttagtcgtcaagagtgtagttgtaggagtttgatattcgtaaatacaagttaaaaagacactgaaaataaaatttttattgtacaaggtcgtaatatacatatgacttaatatgaagtaaaactagaagaaaatcaaaaatgaagagtttgaactgcttctggctctgttgttggattccctacagcttctgacacagcttgagtctcttgagctactagttgagcttctgttgaaactgcttccgcacctaaagatcctgttgctgtttcaaatactgtttcagttactgccagcactattggctcagttgctgagtcggctttagccactatttctactggttgcgtttccttttgtggtatcagttctattggaactttttcagttcctggctgtggttcttccttttctgattgactaatgagatgtgggttcttgacgtcatcaatactatcaaccttaacctcaggaatttccaaagtcaagctagtatattctttgtcactgaaagcaagtactttggtggggtttctagcctcatactcttgcttcaacttttcaccaaattcagataaattcaggtcattttccaatatgacctgtaattgtctctgcaactcatctactggggtaacatcggtatccgtcatgaccttctctgcctcaacttcagtttttaaattgttcaagatatctttgtaatctaccttatggtcgattatgcgggaaagctcgactttttcaggggggaaaatagccctacgcatcaaatcatagttttccaccaatgtggcacatgtgacagacttgaaagtcaacgaaaacaaaccaccctcggcagtaactccattgactatagaagatggaaagtttctcaaagatgcaggtgctggttcatatttcgtgggtggaattaaaggaggtgctccggtctccaaaacggcaaccttctgtctcttgtatggttgtctggccatcctggtcttctaaggctattatattatgaaatggcttgggcaaggaagacttcaagtaggattgataaattcagaagtaggtaaaatgtctcgctcggttgtcaacagagacgtgattgatgcgcacacgaaaatcacgacattgtgataatacccagtaaacgagacatatttgcaatcatttaacaaaagtatatactccaatagatgtacaataatggtattgatgctagaatgtctgcgacattccaagtgtctatgctaaataatacatgtacaaacgaactaaatacgaatgaatcttcacgacatattctccaccaacgattcttcaatgccatctatcaaactgtcaatgtcttccaccttcaaaccacaacttaagctaatcaattttctgtatttgtacattttcgaatcaatgccaaacgtctttattccttgagtcaatttgcttaccaatttattgcgtttgatttgcatcttggtaagctctacagcgtagtcgatcttgttctggtctatgagctcaagctcgtcttctacagattcgcccttatcctgatttaccatcaagtcaatctcttgcttttcaacaagggttgctagttggtaggcctggtttctttccaaaaccctaattaacgattgttcctttgtgcgaatttcttcttcgtgcaaatcgatggcatctgtcaacttctgctttccttcttctacattgctaaattgttcaattccaactcggttcaacattttggtaaagtactgagtagattcgtcattggcgttctgcttactcttcaattgttcttctagctcatttatctttccctcgtattgctgaaattcatgattgtacgagtcagataaggagttgatcataccagtgatcattgaagacaagtcgagcatcagcaacttcatatcaacattttcttcgagtttattcttcaccttttcttcgacgatctttccgttttcatccaacctgggaggctgtggcttgtatgtctgatgaatagtcgaaagttgaaactttttgtcatgaataggagtactttctactgttctttctgatatcacagctaacggttggtgagtagatgctgaagcgttttggtgaggcttcagaataggcgtagacacagcattatagcctttgccatctacgaagatattctccttattgtcctctcctttgattaaatgttcaatgtgattcttgtccactcgttcagtggtggtatcgtcctcgtccatgtcatcatcttgaatcattgtacgctgagtgtctggagtttctataccgttcgctacagtttgcataggtgtcgccaatacctggtattgaccctcagactcgtgtttaacggctggagccaggtagtttagtccagcagctggatactgcgttggtagagccagctgtgaacgttgtccatgatacgtagtaggaatagcagatgctaacaatcctctttgtgaaatattatcagaattggaagcaatgttcgtcgagaatagattggtatgctcgataagatttcgagctgtttccttatcgatattttccaaatcgtctctggctccatactgcaataacaactttgcaagtttggcactggagaatcgtacagccaaatgcaaacaggtgtcaccattaacgtcctgatggtctagaacatttttcaataagtctatctgtttactggggttgtagttagacatcgctgtcaacttgtttaagataatgttcatgtagtagcgcaaactttcgtacttggacttcaccttagaatactggcacaagtagtgcaaaggtgtacgaccattaatgtccgtattgatcaaacacaattccaaatcgtctagcactttagggaagtttttgagttccgaacagttgttgaacgaaatcaacttcgataaggggttcaatccaaagctgtttactaccaatggactggctcctttactgagtagaagatggatcatctgataattgcctatagatgcagcccagtgcaaaggcgtatgcccctcgtcgtctatggcttcgttaatgttgaagttgtatggtggattgtggatgaaatatggaatctgcgcattatcttcactgaaaaacttcaacaactgagccgaataagtattctcttcctggctcagttttggactttgagtgatatcagctgtcattgagtcgttcatcccgttctggatgtgtttgggatcctcatttgtcgatacagatgtgtcgctgtctttttgggtgtttcctagttcgtcctgagaccaattttcattagacagaggcttactactgtgttggaaattgcccatcatttgtgcagccaacggggtttgggagtacccattagctccatttggatttggttgatttggataaaactttacttggtgctgttggtgttgttgttgttgctgctgttgctgttgctgttgctgttgcattctctggaattgcatctggtagttctggaattcgttctggactgcctggttatgtggagtgaaattcggaatattggacataccgtttccgctcacgttcccattaatgtggatatagtcttgttgaggtggttgtggtggttgttgagtgaatgtcagcatttgtggggcttgcattttcatcatggcattattggaaggaatctggtactgaagatgtggaggttgttgctgctgaagaagctgtgggtgtggaggaacggcatggctatggctggaagcaccctggcccaaataagagctttgtctggaaagagtattgaaatcctgaccgttttcgtcggttttcaacttcttgttgtcttccggcttttttgcctttttggtatatttccgcttcagcagcgatggttcttttggctgtggcttgaccttctgggggattaccaaattggggtcttccaagttgagaaagaggaccggtgctgcgtcagctgttactccatacatggtagctaatctttgggcatcaggcaaaggaatccacgttccttggaaacgaccaaacccaccttggaccttttcgtgaagaccctgttggacgcctttctccaagattttggttcttttcgctttggggaagttgcagcacttaagaatctgggtagcattgacccagtcgtccttgcaacgacgcatgatgggcgagtcgttcatagtacactcgtacacatcggtctgtaaatattgttagtatgaaaagtcatgacgatgatagtgagaatgttgaagcatatatgatcatattgtatagcataggctaatggtttcaatttggtgtacttaatgtgtcaatcctcagtgagaagttgcgcgtaatccactgaaaaatggaaattgttaactgataaataaatcaataacgagtgaacaattgataattgacttccatgattgacgagatcacttggtataagttgattcccatacgccagtagttgtgaatgtctactgtagctatgttatttgttggaattatgaagcagtcctttgtagtatgttgtagtccgtgattgtcctcctagggatccctagactctcacttgatttgcctttctcaccattcacatttgaaatctacttacactcaggtaggtggctcgaaacactcgcggctcagtggcagacatgtcgaagagggccacaccgaagctttgaagactgtagtagtaatacactggaaaaagaaaaaaagatcaactgaattttggagccctttcttcactataggtggctccttttttgggcgggagaaaaaactaagtacgcgtgtatttgtgcaggaatgctggattggggcaattaatgaataactgcgagtaatgaaagaacaattggtgggtgttagagaagcttggaagctgaaatatacgaagcatttaccaaatgcaattctgaagttgtaatggtgtgtaatttctatttcaattacgtgtcagttttcttaacgttcaattttcaattattcttcattttgattctaatctgtaggacgtatgttacacaaaaccacagccgacattcgcccgctaaaagatgctattactgtcgcttcaacatgagcagtttgctccgtatatatgattggagagatgtttgtactctcatggacaacttgtgtaattttcctgttccagaattcatttatacgtttgcttccatctagcagcgctacagtttgttgttgcattatttcgaattgctgcgaaatttcgcgaataaataatttttgtaaaatgattgcaaaatcgaacagtgaagatatcaaatatccattattgttgcattaccagatacacagatagtaagcgttatataacttctacaattcgcctgtttccttcaactcatcaacaatttcccctacagacttggtgacaaccgaaactatggtttcaatctcgtcctcagatactatgaagtgaggtgcgatgcagatgtgatctccaacccctccattgcatccctggttacccatgacagtcaatccgttatcaaagcacttatcctgaacaagacgggtgacattgagtggcatggggaaactctctttggtgtccttattcttgacaaactcaatggaccagaatcctccaagtccacgaacgtcacctacaattggcagttctgccaaactctcctggagctttgcacccatgtggttacccatttcaaagatgttctttgtcaatccaagagctttgattttctcttgaatctttaaggcaaccaaacagttgaaaccgtggccagaatatgtgtgggcacctgcaatgcgtcctgaaccagcaagaaacacatttctgatcttaggagaaattaaaataccggcaatggtaacatatccagatcccaaagtttttcctacagtttggatgtctggaccttcttcggcagtcaagaagttttcccaacagttcaatcctccgtttggtgaaactctaccagttccacacataacttcatctaacatcattacgatatcgtatttgttacacaactttctgatgccattcaagtaacctggaggaggaggcgaggttcctaaagaactacctggcaatgtttcaacaatgaccgcagctactgtttcaggatcttctccggtgatgatatcttccaaattagcaagaagtctttgcacgtacgcttcagttgtttccgtcttcttttgatgtctatatgggtaacaaacatccatcttcaagaactgttccttgggtaacaagatatcagaaaaagcagctgccttggcattgtcggaaatagacatagcgccagtagtaaaaccatggtacgaagtctttcttgagatgaacttgatcttcttcatgtttcccttttccatgtggtactgtctgatgatcttgagggcattctcgttcgactcggatccagaaccgcaccactgggcagcagcgaaagcgcccttgggagaattgtcaatgtagaacttggcaagagcttcactgtacttatttccaatgaaagcagggtacgaataggaagtgaccttggcagcttcattgatcatttccaatacatcagggtctccccaacccaaggcacctacagctgcgccggtgacaccatcaagcaattctctagtttcaccatctttttcaactgtgatttttgtgccttcccctttgagaacgactggaacttgttcatcaatcttggcttggaaaatgtaagatttttggtcttcaacggtcatgatagcgaatctgcaaatatactaaaatatgggtgcaaattaaatataaaataatattctgaaatcttattcaatactttattctaaattcaattcagaactaactcaaagtgtctcggaaatagcaattgcccacctatatatacatatttagacggcagatctcgattagaagtatttggcagctaaccgttatcagcttcagatagcgcgtttaactctttctagaaaggagtgggtccacaaattccggtcgcagagataagcgctatctatgactggattcgggaagcgccccatactgagcagatgggatattttcgagatcccgagtaattggactagggaagccgctcaccgggccctacatacctctacagtggatcgtctctacatacctattagggattattgctgtgtccttatatctacaagttaacaaaatggaagcgtttgttagtcgcccagaaacaagaaggaaaaccagaattgttcacacttcattgacttatggcactactaacagaaagcttctgtaacactagaccttataagaacgagggccacctaactagagtttctaaagtcttagatcaataagctgatatcgtgctgatatcgtgtatcgcgctccaacagtttgcctaatttggacgaggaattttaaaggcttacagtataatacaagcttgttgaaactggttcattttgcaactcgtggacgcaattgcaagattagattcatcaacttattaactgatttctctgaatggttgaatggatatgtttttaggaaagggtattctcaggctcggactcttaaatctgactttctcaaaggaatagcaaccaatagctgcgtcaatccagacattctcaccccttcacaaatttcttcgctaacgcatgtttaggcttaagcacgtttctgtaatcattcatcccccaccttggctttccaagcaaatctgcaatggcgatgtttttgttttcgcaagctcattacgtcataaagaacatgcacctcacagaaaataactctattcggcgcccagtctcaacactccgagggcgataaacgaagagatatggtgggtaacactaccagccactaaccagatcgtaacttgacaccgtcataaccctcctagaattataccgaagagacttacgaagaatcgtgcagagagacaaattattggtgctataaatactttactggccataaactatttggtgaaacagtgaacactaaaggttgaactctcaacgcggtttgctttcaatttctaccatagtcatttcaagtggaggaacagaaacactcttggcatagaaacgagcatattcaatattgttgtccatcattgtctttcttcggccgcagctaactactgaggtgttgcatttgcgccccgctgtctccgcatcgcgctatcagacactcttttcgtctgtatatatatatccatagtgaatctcaccacctcaaattccagctctttacatttgaaccatctatatttattgcacttttctgtccaaatccaaatccttagctaccctatttgcatagctttgtctcttgcccttcaaaatgacttcccgtctaggcatccgacaagcgcgggtcgaagaagtcactgggaccatcataatgatggatgatccagatgacatgccacttgattctacttcggctcaagatggctcgcttcacagagagtcacttaccatcaagaaaactgccaccggtgtgattctcaatccacaaccacacgactcgcccaacgatcctctcaactggtctgtatggaaaagagacttgtgtctattaatcattggatttcagtcatttctaggaggcggccagtctccgttgcttgctgctggtatgagttcattagcaactgagtttcacaaatctacagcaacagttgcctatcttgtaggagggttcatgttgtctttaggtgtaggttccgtatttgccagtccttctgccgttctcttcggcaagagattggtgtatttggttgggatccttgtatttcttctcggctctgtctggggagcctcgtctaaatcgtttggcagcttaatgggtgccagagtgatgaccgggtttggtgcgtctcctaccgaatgtttgcccagttctactattgccgaaatttactttgctcatgaaagagcctatagagtcggcatatacaccatgttgatgttgggaggcaaaaatatcattcctttgctttcgggtttggtgttccagaacctagacagacactggctattctggatccaagcaatgtttttgggtgcaaatctcattctcaccttcttgtttgttccagacactttctgggacagatcgcctacacctaataagagatctcaagaggaaacagaagctgccatgaaggtgaaatcgtatcacccaccagagcaaagaccaaatgcatatgctttgcagcgtccttcacaaatgaatgtgttggatttggaaagcatttcatccacagtaaaccccactaattctcaaacaggacagcccatcggcataaccgaagccgagactactcattacaatatacccaaacaaacctttcgtcaggatttggccatttattctggtagacacacaaaagacagttggtggatggtggctctaagacccttcttcttgtacacatatccctctgttctctttggttcgtttatatactccttcgctgtagtgtggttgattgtgatttctgaaactatctcagaaatttttagaggcgaagggtatggatattcccaaggaacagttggattattctatgtttctccatttgttggaggtatcttaggctcactcactgctggtttagttagtgatagattgagtcgattcctagtgagcaagaataagggagtatatgaacctgagttcagattgttcatgatcataccttctacatttttcatagcttttggtcttatgggatttggatggtctgcgcaagacaaggatttgtggattggacccgttatcttctttggatgtttgagttttggaagttccatggcaagtaccactgcgataacattcacagtggattcttataaggttttctctgctgaagcattagtatccttcaacttcttaaaaaacttgattggtttcatattttcgttgttcaataacaacttcgctaatgcccgtggaaatcgtactgcttttgtaacttatggagcagtgcaaatctttgtgagtttatgggcaatcccattgtacatttacgggaaacgtttgagaagttggactgataagaaggaattcttgaaaaagttgtaccatgttgataatattcctagaaatgtctacaaggaaagcatggccaccagtgctgcgaatatctcctcgcccaaggaagcaagcactccatcagggccaatctcttcttcactctctgttgacgacaacacggttcataatagtgaggtggaaaaagtcagtagcaataaggacgatagtgttacgtctgaagataccgcaccaccacaaaagagcatttgaataacagtcaaatcagcctggaatcttacgaaatgacgattgcattaattctgtacactagtctattaaaatacgctttatagaaaaataactatacttgtttcaatacgttcaaaccctgtaatagttgttcattttgaacctcgataatctgaggattatttttcaaataagtgtctaatctttctgaaactgtcagaccattccatttgttggtttcagactgtctaagaggcattcccaacttctctataacacacccactgaccaaatttccacttactcctgctactagccagttacctcctgacaagtaaaatcctgctatgcatcctccacagaaagagtttccacctccagtgacatctactacctttgtctgatcgctgtgataagcaggcaacaagacattgtagtcgtctatggtatttatgaaacaaccaagtggaccacatctcaagataattcctgagttcttgagctttaaatagggcataaaatgggacgctacttccttaagcttttccgatgtgctaggaagtgaacctgatctgcccaagagtgcctgggcctcatcgagattgggtgtgaaaatgtcaatcttaggaagcaagagtttgagcctgtcaaagttggtagagatacagtcgtctgggagaggctcatatatgtaaactggagtatggtctagtttagagttaagatcgtctatgatcgattcacaacgttcaatagagcaaatcaaatgaaaacatcgcgaagtcgacaatttatccagttgcaatatatcaacgacttcgatacgtttcttgggattcttgtaggaaaaatgacggatatggttctcgtcataggtgtttactcctctggttgtgagtctttctgggttctctcgaaagatgactccagactgccatgaattcaactgctcctcaacctttttaggaaagtccagacccttatcgattatgccactgaccctgtgtccattttcccgtcctgctatcatggtagctcctacaatggcatacggaccacctccgccaataatgtctgtgtcgttctttctgttccaagacggaggatatatattgtcgtcaatgatgaacatgcccatcgaagtgactataacactttcgctgttgttagtcatgctgttggatgctaataatctcgattatggtaattctagaaattcacgtgaacaaatgattgcaaaaagatagcaatcagtgtctggtgcaatcaacagtgaggacaaattgtctgtctgccccaccaggcacaaatgcaagatatttcacgtgacaaaatcagatcttctgcagaagaaaaggtaaacaacaagaggggaatgcaggcgcgtggccagttgataggtagtgctgtcgtgcgtgctattcttatctaagagatgaccagaatgataattgatctgaaacaacagagcacacaataacagaaactaaaaaaagacaagaatatttgcactggtagtctgctctatttttgtggcacagccgacattttttaactggatctgttctgcctacgtgtggatcttgaagcagacaattctaatattttgtgagtggaaagaacatgtgtctggagtcgaaccaaaatataagttggcgctagcagacactggatgatagctgcaagatgcaccaattatagacccatgataatcccatgggtataccagaattgtttagatgtatcagactgtaactacagtgatgccataccccggaatgttcgattgacaacagcaggcatttcgagtgtggttgataagaaatgttcacacagaaatgtgaaacgaaaagtgggttatctctcttggctgctctgtcaatggaaacttctttattactgacgcacgcacagattctcctgcagcctgtgcacattcactcgcgcgtggggagcaaccgaagagtcacgtatactgaacctctcctaacgaagatctgaacagatagatcccttctccattctcggtctcggttcagattatcagtgtaattggaatttttgatatctactctattataaatccttctcggccacgttattgtctttactgcggtatttttagcaaaaaagtggcgcatatacgttccagcaagtcgattataaccataacctctccaaaaagatagaagatccattttgtgcaggtgtatacttggacttttcagggtgattatttagataatttccgcagcatttaaaactcttgctgaagcctttgcttcatttttttcagttttcttcttgtaacttcattggtatctctctataatggctgtagaaacaagcaccgtagccggtgttgtgtcagggagaaatcctttggcctactcggcttcttctccatacacactttttatgttccaagcagtgttcatcattctctttgctcacatcatccactatccacttaagaagctccgtcaaccacgagtcattgctgaagtcattacgggtatccttttaggtccgacggtcatgggaagaatccccaacttcaccgcaacctgcttcccagcagcttctattcctggcttgactttgttcgccaacataggtatcattttgttcttgttcattattggtttggaagttgacatttcgtttattcgcaagaacttgagagttgccgccaccgtcggtttgataaacatggctgttccatttgctttgggttgtgccattgccaaagggttctacgatcagtatcgtgtggacgacgacactgcgcctcctatcaaattcactacctacatggtatttatagctgtagcaatgtgtatcactgctttcccagtgttggcccgtatcttgactgagttgaacttgattggcgacagagtgggaaccattgttttggctgctggtatcaccaacgacttgactggttggatcttattggctttgactgttacattggctaattcctctagaggcatcaataccctctacatcttgcttttgactgtggcctggttcattttcttgttgtaccctgttcgtttggcgttgagattcgtcttgaagaagttcaccaacgatttggtctctggagaaccttcgcaggtttccatgatgttgattgtggtgatggttttcatctctgctttctacactgacatcattggagttcatccaatttttggagctttcatggttggtatcattgtcccaagagataaaggatatgtcattagaatcaccgagaaattggaagatttggttcatatagtattgattcccctttatttcgctatagctgggttgaacgtcaacttgggtttgttaaacaaaggtattgactggggttatacaattggtatcattattcttgccatggtaggtaagatctttggaggtttcatctctgccaagatgaacaaattgttgtggagggagtctctcgctgttggtgtgcttatgtcttgtaagggtattgttgaaatcgttgtattgaatgttggtttgaacgccggaatccttagtcacaaggtctattccatgttcattgttatggcgttagtgacaacttttgctacaactccattgactcttttggtgtacccagtctcatacagagaaaagagagacaagttcatcaggggtgaaatcacttgggatggacaagccattgaagggtctaccgactctgtctcaaccaatcttttggatgaagatggaaacaaaatctcgttcgtcaagtactcaattgaagacttgtccaactacagaatctctaaggttgtcttgttgttgaagaaaatcgatactatctcgtaccttatgacgtttatacagaatttcagttcttctgatacaaacatcagagccgttcaccttcgtgaattcacctctagaacttctcatcttttggaagcctcttctactcagtactatgaccaggaaaaggaaaaagtggcacatgactttgagtacagtgattcattctcaatcttgtcgataatcaaggtattcagtgaaatgttgggaatcaactgctcgtccagatccatattgacaacgaccaggaatcaagttttgtctatcaatgaccaaatttccgattcttctaacttattggtcagcagcataaagttgaaccagttgtcgactgaatctcaggaatatgagttgtacaagaatttgttccttgagtgtaggtcccatattggattattgcttgtcaatgaacctaacagtaaacctagcacgtcagccatccaacatgccaaagactccaaggctttcagctttgtagaagatgatctgttcaccaagagagtcatcgacttgaattcaatcaatttggttcttacccacgacaacttagttagttccagtgatttgttgtcaatccagttggtttctcaaatcatttctacgaatcagaagttgcacaaggtaaacatttttataaagtcttcaggtcaatcaggtccttcttcagataatttcgagaatcaaatcaaggaattgttttcctcaaagaatcctcacattgacttgagcattaactacattaagccatctgccaactacagaaacgaaattctcaaaattaatccaaatttggccaatgagatctttattattgccaacaactctagtggagagactaacttgtcacaagatgcattgttcgacgaagatgttgaccagcttgtcaacttgagtcttatcgaatcctttcacatattggttgttaaggctagtcgggaataattctattatttacatactgaacaaaatatgattagctattaagacataaagtagctctatgtagaatgtctcgggtttctacgcggtcgataattctgtctggtcctctatttcttctgcgattggatctttcaagtcctcgtcgtaatcttccatgaagaagtaagcttgaatacaacaaattaaggacaacatggacaacaagagccaagaaacctcaccaatagagtatttttcacagagggacattatataaccccatagcacaggaccaatacatcttgccaaagatgagagactcaaagccagaccgttgatgaatgcacggtgtttggcaggagatgctctgtgaattaaaattagaatattaggaaatcctacagcaccgaagaaggtagaggtacaacacaaggcatacaaacatgctttggttaaccattctggtctggcaggattataagcatgcaaagtgaagatcaagtagggtaaaatgaagtaagaaaatggaaagatagatgcagatgctctgtatgagttcacagtcttaaagtttcgatcaattaaaggaaagacaaacatgatcccaagaccaccaatcaaacctgtagtagacaaaagtgtaccaatgtcgctagattcgtagccaaaaccacccttaatggtgaaagggaacttcaacttgtctaccatcaagtcaccagccaacattaccggtaagaactcagaataaacaatactatggaaagaagtaaggaagttagcaataatcgtttgaaccacaggtttggtaaaaatttccctattaaagccctgggcattggtggttagtacagacatattggtagtggtattcgagatgaccggtccaagttggttggaagagtatctacgaacaagagcattagagtatctcctggtaagaagaggaccagcagagtcaatagaatctgtagaagagttcccttcaacagctgagtacaattgctgtggtctattgaatggagtcacttcattagattcgtcatcgctttccaaaggtggaggtgtagatgtttgaattgtgggttccaccgttttggtaggtttgctctttttcagtctggacttttgttttctactcttttgccatggtctgacaggtgggttgaaaccaaggagtcggaggattacgtccccgatctcaagacctctgtctctcttcctcttgtacctttcgtgagtttcttccaagaacaagaagccaacaagcatactgaaccacaagaatatagcaactactatgttagacaaggcgtatgggtgtttcgtgatgaaactttcgtaaaagctatctttaccagtatcgataaagctggttttgtcgatagccatagtggtgattctcaataaaaagttggaaggttcatcgtcgtacgctgggttaccctttggtcttgtcaagtacttggacccaccgatcatgggtccgatcacagaccccacattccacaaaagtggtaaagtcgagaaagcaatggcttgatgtctcctttcagtagcaatctcaccaatagctgttctcaacactgcgatatttccatttaccatccccatggttgatctggccaacaaggcgatgtagaagttctttgagaaaccaaagagtagaagcgagcaagaagtaccaaacaagcctataagcaagattacctttctacctactttgtcggaagcttttccccattgaacacagcacatgaactggaaaaaggcaaacgaggccgaaaggtaacctgaatacgtagcaatgtcttcctttttatcggcgatgccaaagtctctgatcatgaaatatacatagggaaataaagatgtgaaagcaactggctctgagaatctgatgatagaaatcacaatgatctgccagaggggaaaccccttcatctgctctttgaaagtgagctttggaggcatgttgaaacctaagtgaagcttgaatcagtagaacaattggagtatagaagatattagatcaatcttcaaatacgacttcgagcaaataacagatcagctgagaagatcactaggctcatatactgcagttgaatcagcttcaagcaaaatggaaatactgaaatattctatagtgtccaaatcgattttgaaattttttagatttttcaaaaaaccgaaggaatataaagtattcagggatgaatgtaattttccagttctctgctaataggtcttgatataagcgatgtcttgtctgaccaacaggtttgccgtttataagaagaattgaacctggttttatattcggaaactcgtcaacaattccttcacactaagccgtaaacaatacggacaatgtgtttgtgcaatgagttggtgacgtagaaatggcttatattttctagcgataaaaaaggtaaatgccttattgtgttgcttgcgcttataatgcgctcttacgttattggggatgaaaaagtggagtgaaaaatcagaaaatggcttttcgctttctgttcacttctcgctcagactcgatgcttgtcgatttatactctcaattttcaaatacaactttggtcggattttacagaatcttcacctctcgctcttatctcaagagcccagaaaaccgacctccacagtttgcccatctattggatctatgagtaatcaacggtgaacagtctgcaggctgaagatattgtgctgccgtttgtggtctataaactcgaccgaagtctcattactcatagcacaaattctaataataactcgtctatctggagtttccactgccagagtgctcgattcgtcataagctgaccagatcttgagagtcacagcgtctcagagtcacaccttcatttgtttcgtcgctccaccaaatcgacacgaaccttgcttgtgactaacagtgtaagctctctaggctttctatacactgagaagcttgcttattcgtctttgaaatcagcagcaatgtgtgttttgatcagataaatggcacgtctaggtaaagctaagatacggagaaagctttaatcagctttttgtacgtgattaggaaaaggatatacccaagaagcggtatagttctaacttagtacaagtatagtcggcttcgagtgcttttaatttaacgactctgtgtttctaaatgcgccgtatatccaagagtcttatattgactcctttatgaaaatgtcacaacctctaccaacacaagagtgaattgacgttctcttcaagaaagtgatgtgtattgcgattaaagtcgaacttattcactacgcagtatatatatcatcctctaaacgaaatctactgttggagaaactccagagatatggttctccgggtgattttgactagatcctaggtgatccttggaaaactatagaatttgtcgaaaagtgctttttcatgtgttacaactaaagtggaacctaactactactgactatctaaatctttctctaatccataccgaaaggaaggagatcctacgataaaaagccccagatgctattacctaaaatcaatggcgataagcttgcaaaattgcaaaaaaatgccttttttaatgtagtagcatacattgaacgtactaacccatataaacagctataaactagggatcaaggtcattatcacccaatgtaggatgggccagaaatcaaattaaaggtataagaggtataagaatcctattttgtcctgcatattacgcctattttttttttgacgaaatggcatgtattgcgactaaagtctaacctatctactacaaagtatataaatcatcctctaatccataccgaatggtggaggaaatcctaggataaaaacctccgagtgaaattacctaaaaactaggtgatatccttagaaaactgtagaaaacttgacaacggtatatgctaccggacttgtaaaatgtttaaataagacgtctagactgcaaaatcgatacccaagtagaaagtgttgacagagagaaggattccctgtcttcactgttccgccgtcgaacttgaaataagtagacagtaaggaagtatcgatttagagaaaggaaagcagccacgggaagttcaaacttaccaatgatgttgtttaaatctaggttcataccttcaggccctaacaaattccaaaacgtgcggctagcctcacagtcttggtaggtatggtgaaagtatttccgtctttcaattgagttgaggcacattacacaatcttcaagagcctccggattgccctggcgttcgcggtgaccaaggtggaccctgtgtaattcctctgtccctttgggatgaagaagttgtactttataaagagccttccaaaacttggggtaattgtcctgtagcaggggaaacttttgaagtagcgtactggagctacacaccggtgcttgttgctcatatttggctgatctacgagtaaatgtcatgcgatcaacacggctggtgatgtgtttatcccagtccagctgaagtggcggattacgcaccatctcttgtttctcgttaagcgtgaaaggctttttaaaatatgaattaatccaaaacctcctacccctttcatccgggatatggtagcggtttttcggcttaatgatggtaaaccatgcttcgagccatgctatttcggctctggtgaattgagtgtaggtcttgtacgctgacattgcatgatctttgttttggaccgcgtagttcacaaggaaaaggtaccacggtacgatgtcccatttcaggggatcaagttgattgcgtgtcggagggtaaattgtatcaatgaaggattgaagtttgtcacggagaactatgagattccaatccaccagattcgtcaacgtttcgtagataacttttgcccgtcttcctaagagctgttgcttgacattgagtagtccgaagccccctttctttttcaagctactaaggtttctgtcgctaatgcgagggagatgtccctttaccatctttttgatgtgcttgatattgtcatttgccatgggatcatgtaggtctcggaagtaaattttcgagaagatgtaagtattgaaccccgtgcatctgagatgaattggcaattcttgtatggtgtggaaatgtagctgtgtggaaagagaggagatatacgaatcccatcggaagccgttaagcggaactccgaggtatttgtagtcagtggtgctaatgtcaaggacttcaaagccaaggatcttggtaacatcttcgggaggtgactggccccagtggcaggtccgggacttggcgatactgaccaacgagttggatgcttgttcaaatagagtaagttcttctttgagaatttcatgatctctggttcccttcacaaaaactgtgagatcatctgcaaaggctgaatatttcgctgttagcggtggtagatggtcgagttgaatcggaattccctcgagccgactctgtaatcgttgtaaaagaggctccaagcagagattgaaaaggataggcagcactgggttgccttgtctcgttccctgtttgagtggaaaggtctctgactttgtgttgttggtaaaaatggctgcaaattgttgtgtcgttaccaggagcaagatccgcttgaatctggggccaaagccaagttggtcgagtactgcagacaaatagtcgtgcgatatccgatcaaatgctttagtcaagtccaatataatgacatttgcacttttcagagtctcggggtcttttgatactttgtcgatgagggcccggaaccgttggatttgaaagtccatctggcgttcgggcataaagccgcattggtcatagccgatgaggtccttggtcaccttttgaaggcgcatattaaggacctgcgaaatcacccttaaagaagtattaataagggagatgggacggaaatcatcgaccgtgaggtccttacgttttctcttgggtatcaaacggatgagaactagagccattgactctggtaatattcccgtttgcatgatattctccgcgtcctttgttaatagtgggcctgccttgtcccagatagcctttaggaaaagataggtcactccatcttctcctggcgtggagctgttggcagtccgctgtaatccggacgtaagttcttcatatgtgattggcttttcaagctccacactgtcgctggctgatactttgcgacggaacagctgtacatacctcctaatggagagtttggcttcttgggcctgggaatccaggtaaagcgctgcaaggtgttctcgttgtatctctagtatatctttggttgtgatggcggtgcgagcccgatctgcggttgtgagtgtactcacaattgttgctgcatgggttgcccctttgaaccggtcgttgagatccttgaagatctttggtggttgcctctcttctatttgggaagtgaccgactgttgatttctaagatagcctattattctaggcaatcgttttatgaatgcagtgtagtcggaaaatcttgtttgttgtaagatactgaagagatgtgtgttgtctagccagtggtcctttacgatgaagcggggttttctgatttttaaggtcgcttttggaaggataataaggtctatttcaactgttatatgagttgatgagattatgccttctttgtgttgatggtatcgccaaaccctgtctttaagagacgtggggagatagatacgatcgaggcggcgacaatttcggaaattgtcattcgtgaataatttgatttgaggatcgagccctctgagagtgtcgtggagttgtaagccatggaagatagcattgaatgcatcgcgtgatgcgacttccgtgttttgtccgacgtgaaaggagtcaatttcagggtcaaggaccatgttgaaatcgccccctaggcagacgtggaatgtagctcctgcgttgtttagtttgaagctttgggtgatgatgtcaatttgggagtgtaatgaggtaaacaacttggcctgagccggatagttcccgcttgggccgtacacggatattatgaggatgtattcctctttctccgttagtttgatgatggcgtcagttgcatagggagcaaggtcggcgtctagatcaaggttgttacttgatatttgctggaagtgggagtactggagatttaagattatcccagtgcgtgatgaagtgttggtgtagattaactccttttgggagtctttcaatgtattcaggagcccatgaatccattccggtgtcaaatttggcagcgaagtagaagaggtttcctggaacaggttgttgtagtttaggttttgagagtggaaaacagtttcctggatgaggagaatgtcgcatttatgtgctagttctcgaattttcgcaggatcctggtttcgttgaatgttcttggatctaatcgttattaagttgttgcgatgattcacttccgatgcctttaaggtcggattggttatcgccgtatctagtagattactcatattaataatctattgtgttggaggggttggcttcgtgtgagccaatcgtgacagttaccggttgatgagccaaattagtatggtcaacaatgtcctggtgtatacttggagagtcgacttgtgttgggtcgacgctttgactttgaaatcttagtgaagggtcagatctttccatgttgtccaaaattgtggattccggttcccctagagtggatcctagtggggaatccgtgatatccatgactctggcaggaggatctgttattggcggaggatctcgtagtgttgggatgcggctggctgaggtgttttgtgcctgcagttcgtcgcggcttaaactaagagtcttattaagtgcttcatgcaccctttgggactgtcttagagtctgacttttgttggagtgggagagtcctataataggagagtaaggggtcggttgcttccttgtgagaggggctaggcgacccgagtaggatggtgaagagattggggttgctaggggtttggtttttgatgtgacaagggatttaccttgctttcttgggcgaggcgtgattggttgaaggagcggttgtgttctggtcggtttgttgccagcggcattgattgtagtttctgggaggagctccatttcttggtcctgaacctggtggctaaggatgacggatgcttcatcgtcacggatatcttcatcttcgtctgaatcggtgtatcttactgtttcgtcatcatcatcttggatgtattccctttggatttgatcttgtggtctctcgttgtttgaggtattgcgaggtacccctgtagatttagggtgcatgatagctctcatggtttggtgggagtcaggttgtgctgactggttatggctcacgtgttctgttactcccgattctgggaggtcggcgagtggcgcgaatcgattacctccttgtctatgttgggagattaagggttgtggttcctttcggcgtggagcgcctttggtcaccgggttaaacccatcgtcgtccttttgatgttgtttgtatggacgtgcgttgttaggggattcgttctgataaaaatagggtacctttgcaaccggggccttgaatgttgggcatcgtttggttgagtgctgattggtgtgacatttgaaacagaattggtatgaggagataatgtctagttgtacaccctgcatgaaggcgttctttctgtttggaatcctatccgattccgtcgcaatcaaatagaaagcagactggaatcttgacagagtcgatctgcctttgtggagtggtacttcccttcggtgtttagctagaatatcgtatacgataggctctcgttcttccctgcgtaaagacctgtattgaggtacttgatacgtgtcaagcgtatttgggttgaacattgcttctaatagattgtctaagtttttgtttccaattggggcttttatacccacaagaaagacgttgggataactagaaagaggaataagtttaagtgtaaatctgtagttgccttcttcccctgtgtagtaagggtcgaatatttcttcaaatttagtcttcagccatttctttggaccttgagatttgaagcgtggaactacagtattactttcagtaatggagaagttaaagtttaagtgcagattgtcccggatatgtatgtggaaatactcctttatgtcataaatcctttgagtgatttgaagtgttttctccaactcttcaatttcaagttgggtattgttgatgccccgcttcaactcctgctccagagggtcccctggggatatctggttttggtaaaattgaagtgattttttgagactggcaatactctgctcggtgtgttcttctaactcatctaacctatcaggtatagtctccttaaagtgggtaagaattatcctagctttgtcctcgatgctcatttggggttttaacaggttcagtctgtattcaaatgagtcaatgtggactcttacatctaacttttcagcaacgtttctgccgattgtgctgagggttgacactcttacctcctcaggcgtatcccagtcgtcgaaccttttctgttggcccttatagtttgcttccgataacccttctaagtgactgataagtgtcgagtatgtgtcaaactggtcaaagacttcattggtggtaggaacgtccatcttcatctgttcttggagggcctccattttcagtctgtatgtttgaagtattttgtcggattctttatcgggaacatcttgaagaatatctgcccattttgccttattagggtttggaagaggagtagatctaattgccttggggtttgagggatgaatccttttcttagaagaactctttgaggttcctaagagtgggtattcctctgcttcaaggtcttgtgtatttttttctgggagttttgtattttcggagtttttttggtttttatttaagtattgtaaggattcagaatttttttgggtttttgtattttctttaagttggtgtacaaggagagaatcttcttgttcgggcaagttcgagaggctggttgtagaatttaaagaaatgtgatccatttcattatcatcgtttgcagccatttcctggtcgtgtacctcgtcaagcacgtgactttgaaaaatttccgaaactgaggtttcaaaactttccatagtaggacttaatggggtctggttctgaataaccagctcgtccatgggattatcccgtagttgggccggttcctcagaggtagatgacactgcagtcacgaaggatggctctaaattgccgttttcatcggcatctgtggactcgccatcgaggtccatcagatcagggggtgcgacatggtcgtgtggatttcggtcaatatccggtggttttggctcgtttaaggcttgatttgaagagctttcaccagagaaaacccctagaggtccctctggctgattgattggtcgtagttctgacattttttacaatcactaaatctgcctcatcacgtgattttaaatgatcgaaatgcgattgtttcaatactactcccaaataatgcccgcttggccaagtggtaaggcgctccactcgtaatggagcgatcgccggttcgattccggcagtgggcattattttttgaaattcatttttcctactgtttactattttactacagataacgtatactgtgatattcgagattgatatttacataaactaagtagcttttggtggtggagggggtaaagaatcactgctggcaccagtacgtgcctggctatccaatactttagacttggccaactcttcgttcatgtagtcactcaagcctccaagagcagcggtattagctactggatgcttcttcttcttagcagcagtagaacgaggaggagctgacaggacagtcagaggaatgaatgaaccggcagttggaggtggagcagaaggaagagatgtagcttccggaggaccggtaggagacttttcagagaattggtaggcgacgttttgctcgttttcaaacaagacgtcgtcagtgaattcgttattctcaaacttgcctatcacttcaggaatcctgtggagcaaaccgtagcccacatcgcaaccaagtatacctttgttctgacccgttccccaggacctggagaggttcactgtgacaggcctcaagatgtcgtagtcgtggttatagacgtacaatgtaataggaacattgtcttcctgtgaaacagcataatgctggttatagtagttagagactacacgtgataaaagtgattcgccacctctggccaaaagaccttttccatcgggatccagtggataggcagaatcacacccaatgatgtaatctgaatatggcaccaattgtgatacgaatgcaggagagccttgatgtgtagtcaagattctccatacataggccgcagatgtgatatgctgagattccaaagttaagcccaatctggcgaaattgtctttgaatagggattgaactgaagagtctagatcttcctgaggagattctacaaagtcctcaaggggcaacaggacttgtcttaatacgcctcctttggcactccagacgtcgaaaatgattgatttttcagtcttgaagatgttggctatttccttcaagagaagctcaaaattcaccgctcccacttgttccagtgtagcattacctccgtaattgacagaaccgtcctcattgatgctataactataattcagcaatgagggatacaacataggcaactcatgattgttgatccggacaatgtagtcaaaccacgactcaaatccctgctggtgggcactagaatggggcacgacattcaacactcggagtccatagccattgttgttcaattgcaaagcatttttgaaatacgagtcgcttgcgggatcagatgatcctgtgttgccttccaatcggtctacgagtttcttagcaaacgaaaacatgctgtttctgtaaagactgtgaggagtaggactaaatgtgatattgaatgtttagaaaatgtaggtctgtctttaaaggattggtgaaaagaaaatgtcgcgcgtggatgaacctgcgaaaccaggattgcattctagttcgcacaaaaacagtaatccggattttgcagccgtgacagatcactatctacaatattctggtttatcttcgtatctaaatcatgcattttatcatcaatagctaatatacataggatttcctagcaatgcctagaacattaacagtagcaatcctttttggtgtctaggtagaaccggcaatacctccggaaaacgccaaactccaagttctactcaagccgttgtccaaatatgtggacgaccagctgtccgacgagaagaaggagtaggctgaattggaatcaaacaaagcctggttcaatctcaagataccagtccaaccgctgttgacatttccaatgaaagtggaaacttggtcggtccattcctcttgaacgtaggaagcacctctgatcaacgaagaggctggagtgacgggcaacatgtgaacaccatggacgtattccggatgttggtctggagaaccaaagtaagtggtgtagtcaaccttgttatcgaagaaaataccactaactttgtttggaagaatttctgctggttgaatagtgttgtcgctcttgtagaggaagtacaagttcatagaccttgccatgatagccaacatcaagtcaccccttgattccattgattggtcaccgataatctggccccacaatttcataccgtaggcaaagttgtagtcctcggatgtcgattcttcgtttttaccatcaccactggcaaacaaacctgcagcccaagagtgaccagcaaaccaatcaaacattcttgacactgggaagtaattgtcttcttctgatgggttggctacatctcttatcaatgcattgacccagtccttgttgtcttctacccaagtaccaccttgcttgttgtcgatgtaaccaactatagcagcagcatggacgaaataaccgtaatgaaagtggtgatcattgtagtaagcagatccaaagtctgcaccagtatctccaccttgtgaggctgtagatgtaatacctccgaattttgtatcatacataagtggataatattgctggttgttcaagaaaggctcgaacgcttgtttcaaagaagacaaggtactggctgttacttcgtcatccttgagaatttcactaacgaccaaaaggatgtatgcgtacttgtcaatgaccttacctgaaaagtaatttgaatccatagaagcaacagtttcagccatgtcaacctggagttccgagtttgctacttcggctataagcttaagtaaatcagcggagtaagtcaaagttcctgacaaaccttgaacccatggcaagaactggatatttgtttccaaagtctctgtcatggtcaatttgttcgtcaagtaacctgtcatttgacccttggttgtcgatgacaattgaatacctgtagaggcacctgcgacggaaccgtctaacgactcaacgtgatgtgggaaggcaaaaacaagtggatatccagagttcgacctaccttcagttgtataagcaaattcgtaggtagcagaagtactacatgcaacagatccttgtacaacagcactaacaacatactgacctgcagcctcgtcataaaatccatcgagtgaagactcttctggagcagaagcgatctgaataataagaccatcaatagcttgagaaccttcaaggttatatggatccttggcagtcaattcaaagtcaaccgaagaacttggcaaagtaacataaaccaaccattcaccaccagtaaacaaagtggcacggtatttcaagatggtagatggcaaagcagaagaagactctttggtaagagtttcgataccaaccaaagaattcaaaagaggaaccatgtcaccgtggtagattccagtgacaaaccccataccttggacaattggaatttcaatgaaattggtaggatcgccttgggaagcagatatagcaacagaaacagacatactcttcatttccgaaactcccaaatagttgttgctttctgacaatgaagtagatgaaagaatcatttccccaacttggataggattgaagtaataagaatcgacgccaacgttattggtgttttgagagccaaatacacggttggatgtattagtgtgttggatagcgaaaccatagtagtcagcctttgtccagaacaacccgtatgggtaagaccagatctgatcagtttggtcccctaagaacaagttggcatagaacttgttggtttcgataggaactccgtcattattgatcccagctggaattgagagaggaagttcttgcctggcaaaaactgatggaggagaagaagttgaaatgacttcaaataaatctccagagtaacaagtctgaggttctggaacaactgacgtttcaacaggagctgggctactagaagaagaagacgacgaaactgaggaagaagaagtagtaccagccgatgaagaagtaagcagcgaactcgacaagacataagagctggagtatccagatgatacgcaatcactcgttgagttatggtagattccaaatgtagacttgcttgtggtggcgtagacaggttcttctgaaagtctcaaatcgatagtcagaactgtttgagctttggaagaaagtaagttgtcatctccagcagaatcggtagttgttgtaatacaaatagtcacaggactagaatactgatcagtattaatagtcttggagttagccagagaaattggagattgggtaattaaaggattcttttttgtagttgcaatagtttccttcgaagtgcaagactcgaataaggtggtaggtactgtagtggcactgaacacagtggttgtcgttgttggtgcagtcatcgtgatggtagcttccttgatgacagattcggtgtctgtctcatagagatatttggtatttttgattgacagagaagtactataacttgaacttctctcgttagcaccgatagcaacgactcctgccgactctaaatacgagtaggaagttactgtagcagtagcagacgtggtagttgtataagtgacacaagctgttgtcttgtacactgtgttgacaatatgttcaattgacgtagtttgacatgatagaaaaccacaattagtgacagtttcggtgacagtagatttctcactaacagtgtactcaaatgtcgaggtgtttataatggtattaggcttgtcattgttggcgtagacaaagactataggaatcccagtagtctgcgatggaggattgttggacatgatagaagaaacttgtccatccaaacacgcgtttgtcacatacttggtttcggtggacgtaacttcttcttcggccttactttgagtgagagctaggagaattgacccgaaaatggctaatctcttgaatatcattgttagatagtattttccaaattgataggattataaaggttggaggtgaaaaaagaaggggaaaaggttggtaatttaggtttctaatatatgcaaatgaaggacgcgtctgtagagtgcacggggaaaggaatgtaaaggtttctagtcttattatttgtcttggttaaggagtgtagatgattgatcatttccaactttttggctcttactcggtacttatagcgatttatacaaatacaaattgttagacgatcgttctcgaataaccagctatcgaaccattgttaagcctatttttcttgactcctccggttaatgtaaccaatttctgctcatagtttggcctttctttgtcaacgaggcttcattcccttcatggctggagtcgcttcaccgatttggttcaggaagctagcacatattttttctgcacagtcttttttgcagccgcgaattttcacgccagccattttcattttagttacacgcataatcttaaattttagaccatgagacggcatcagatcttcgaaaagcagaagccagcctttggaaactatatactacattctaaagtacccttgctagacgagctacaacatccatacagtacttaaagtacaacaagacgttgcacaatggatgatgaatttgcgacagaagccttttctcttggaacgaattgcattatgccaaattattgaaacgactcaatgggttgtcaatgtttccgtatatcgttctcgaagttcatcagcacttgttcgttgggtctcttgttagagaagctttaaaaacgtttctccgtttttgaaacatccatatagttctttcagtttgcttttgagccagttatttagatactctgaatcgcaagtcttccagcttccagacgatgtgattgaaccttgttgaactgtttgcaatacctacttccgtcttattgctggtcgagcctattcgattcctctgcaaaacgactaagctttcaatgtccctgcatcgcgcataatagttctgatctggacttagatttccaactgcaccgtgctaccttgattctgacgattccagttgacgatctgaaatcgctttccgtgtcatgtcggctatgtcaaaatgaatggttgcaatctgagataatcgttaactgatcacgaaaagtcgaaccgtcgtctacttccaattaggattcaattccgagcccgtggcgagaaataaaagtacgacacaacacaaggagtactttcctcagaatttatgagcgattttttcgtcatccataaccatatgatcatcaaatacaccgttgcactgatcaatgatgttacttggttgtattcacaattgaacattctgttccagaaggaaacgcacaaccagcataaagatgcatatgcaggctgtccgacttacaggaagtcaaatgagatcatgtcgtctagataccttccatatcaggaacctccctaactgacggtctttgttcaatttccaattcaattttcgattcccgttattccaaatttaggaatttcaatcttattgtttgcattatgacgtcaaaggttgtagttgtaggcgctggtgtcattggcttgacaacagccttacagctcaaacgagccaatcccgattactcgatctccattgttgctcaccatttgccaggagacttagatattgaatacacttctccatttgcgggagcgaattggcactcatttgccagcaaaaatgacagagaacttcaggaactagataaacctggctactggaagtttttggagctctccaatgagccgagatccggtgtctggataactaccaacaagtcctatgttaccgaagttgaattcaactctaaaggaagggaccctgccaaatttgttccctggttcaagaacttcgttaagaatttcaaaactattgaaaattcttcagaactacctgatggtatagcctttgggtattcgttcgatggtgtagtcatctctgtgcctatctacttgaactatttgcttcaggagaatcttggggctggaaactctgtgagaagaatcctgaaaatttctaatatccatgaagctagggaccttcactcttcaggagccaaagcagatattgtagtcaatgccacaggtggtttggccaatcgtatcgttggtttcaaagacgataaacgtaatttcccagtccggggacaagttcttcttgtcagaaataatgcaaaatgtgaagttagtgtagagggatttcctgaattggacaatgaaatgttgtatctcatgcctcgaaaggaaggtggctgtattattggaggttgtttccttgagaatttcgccagtactgatgtggatgaacaattgactaagagaattatcgatagggccctcaagtatgtgccagagattgtagatccttcttacaagaacaatccccccaaagttgatattgtgaggactcaggtaggtttacgtccctttagagagggaggtgccagaattgagcaagatagcgataatggttggctattccataactacggagctggaggaggaggataccaaggaagctatggaatgagttcaaaacttgttgaattaatacagaaacatgtgggcaatagcaagttctagacaagatggttaccatacctacaagtagaaataaagttaataaattaagttacaaatagacatacacttaaacagttaaagaacgattcataaaaatatcaattggtaaattatacaatataaaaacatgaaataatatacaactgagtgaatacttattaagctgactatctttaactcataagaatatcagcattgagaagctggttctctccttgaccataggtatccttctttcctatttgaccaaataggacccctctgctaacaaaatcatctacagagaacgttcaaaagaagttgcaacccctttttggcgtacttcttctggtgttctctatcggtatggttggccaagaactcattggccttgctctgtgaagcttcatatggagttggttggtcgctatactgttcagtatggacctgtatatcggcatacccatgttggaccgggaagggcccaacagatgaaggatgttcaggaatagacataagtattaggacttcctgaagtcaagaagcaagcaattgagcaaaactgaacgtctttgagtaaaaggtgctggttgaattttgaaattcacaaatctgaaaagcccatatatccattgtctcctgaaattggcacgtgccctatatcatgtgtctgagttttgcccattgaaagttaaatgaaaccggacagcggctgattgaagtttgacgtcatggaactgtttagtccggtcagttctcactggtacacttgcagttgtgagaattcagcgagttctagcatgttctttcttgtattatcggtggttccgagttcaacctgcacttttgagataagaagaaactgcagatgaacacatgcaacagcgcagcagcgatttaactgaggtcacatgatgcggcatgtgactgctcaaacttttcacttttaaatatttcagtataaccaaccaaatgattttcacaatattgaatctccagcttttctgcacaaaccaagagccaagaaaacatgagagcgtcgcaagtgcttaactttcagcagacggctgtggccaatttgagaagaccatggcaaacgtttcgtgacggacagatttggtacgggattaccaagttgggaacaaagagacttccattaacaacgaaacagggtaacaagcactattataagggaacaggttcttcgggttacgggaagttgaattccagcggaacttacattatcaactggaacaaagtcagaacgtatgtagtaccagctgatttgcaaaacacagaattaaaagctcttgtttctccaaacacccctcaaatctggcaaaaggtggttggctaccaggatggtttcaagagtccagaattggcttttgacaatgtcgttaatttcgtggagtatggtgaaaactacagcaacgaggacttggaactgaatcagtacttggagaagatcgtcagtcccagagtaatcgaagctgaacaagctgaaaatatagaggtagaaaagagttaggcacagacagtgattttcttgtttcgagcaatttctagtagactgctagctatttgttaccaattttccagctatctgacgttgtctaagtattgatctgcaagatagtagagaatgcctgattttcgaagtctgaagatataaagagagcaatatgctcatattcataattgggacgaaagtctctagaactctctccatgtacatagtcataatacaagtaatgcattagaactttgtagaaatgaaatagaattatgaagctatattagttcaatattggatttgatatagtcacgtgacgtcacttttatactttttcaaaatgatgaaaagaagtatattcttccgtaactgctagtaaaatttccactattctatgtctggtattatatctaggctattgatacttagaacagtacctaccgcttcggatcctactgaaatattgccaactctgcggtcggaagtttttaggttctcacgtgcatgaaaatccgaggggatgcgtatatcgaagttccaccaactgaatctccatataattctacgaaacatctcattactacaaaagagtaccatgtcgtcccctgggcctaatatgaacagttctcaagcggagatttcggcctatgaacaaactccgaccacgacctctccaccaatgccgtcaaatacggctacgcctgatgtagaaatggaagatccaggagaacaagtcgaacagaatgaagaccataatgaaccagaagctgaaaacgcagatattgatgaagataaaaacgaaaatgctgaaaatgacatcgacgataatgaagagaacgatcttgagattgaaactgaggacgagcagttgcttaccttaccaatagccaaaatcaagagaatcttcaaattggatccagactatgtttctgcttctcagagtgcagtatatgctactggtttagcaactgagctttttatccagtatttcacagaacaggccagtttgttggcgaaaatggacaagagaaagaaaattcagtatagggacttctcgacttctgttgccagtcatgatgccttggctttcttgctggatactgttcctcgaactcaacccatcggagagttgattcagaagaaacaagtcaatttgctcgaaaccgaggaaatcctttctgtggttaatccagaagcatcttctgcagctataggaaactcgtctgctgcagttcccacgtctacttctacggatgctgtggtagcagatgcctctaataatgtaaatagagaggcaccagtagtaaaagtcaagtcgttgcccaaaggtcagcaaacactcgattttgccgttgctcgtcctttcaagaaggccgtaatacacgacttgatgtccaatgacgattcgagtacatcacagtcaaactcggatgacgttgtcattctttgaagctgtcatctatgtatattagtctataagtaaattaaataagttgtataaatacacgaataacatcatacatcgcaagcattcactttgaactcgatcagatatgtacattagtctataaatattggataaatacatgaatatcattacatctttgacaactagttgtcgtcctcgttcttcactatccacaacgtattcctgacgtctctgctcaacttcatgtcggatggtatgcccattctataacacactctaacaatatccaaacgcaccaagtcagatactgtcctctcatagcagttgaggcctgtgattaagtaagtcacaagaagatcattgacttttggattcaaccgcgtcgtagttaattgttgttcgatcctacttatctgtttcagcttactgttcaagctgaaactatctctcttgcgaagacggccgaaaatgggcgaatggttgatgagaaactcccaggactctatgaatttatttcctaggaaattctctctatcaccatcttccttcacgatctctataacaaactccaaagctggaacaattagagcttccagttctggtaggacaccttcatgaacatcttggaagacagacaagctgctggacccactgatcaacgtcaagagaatgggccagttcttagttaagatcaccaacaccaacttgtagttggtagtcaaaatcggataagtctgtttcaaagtcttcaacacctgcaacttcatgctggttgatttctgagacaacactacaaatccgtaattgaatatcctttgcacaagaaagtaggtattttcaggaacaggtgatggccatttttcttcttctgcaacgtcaggttcttgttcatcgtcatcatcatcgtcagaatctgcagcttgctctgaaaaaggagtatctggttttcttttgaagtattcctttgtcgaatcatatgactcaaatggttcagtcaatttggctgaatcgctcaataatttcaacacctgcttaacactagtcaatccccatggtttatagcttgaagtattgaggtcgggatctaattctatttgaagactgttttgtgagaggtatctttctttcacttgcttggtgacttcttcaaaaaccataaacaaaccttctacaataatcgagtatccgtggtacgaatcgataattacaaacatctctgacaagacgtcattgagttggttcatctcaaggaggctctgaccagctacttttataatgatcaataagataccgggaagagttggtacaaaattgcttggaacagttagtcttaagctgatgttatctatcaagtagtccaggttatcaagtatcaacgactctaacgagtcgttatagtaattcttgagaataaacccgacagctgtctgagcatgcgattgaatgagtgtgtttgatcgaaatgtcaatgcctctagtagagaatacaagaagtctctgaggaagttcgatctaaactcttccaaaggtaatttgcttgaaagaattccaatggtatctaaggctatcgagtacgacatttcgttaactttcaaactgttcccagaaattccagcattggcaagttcaaaagaggtatcattaatcaagtcttgagacttgctgaccaatagatacgacatttcttccaactcatcttcttcatcggagtcattttcaagaataatataatcgttcatattgatcttattcctcgacgacttctggttaatgaaaaagttgttggctacccataatgcgattcctctgtccaaagtgttcttttcgctctcctcatcaaaaagagactccaccaattctaactgtcctgtctgttcattttcatcatcatctgctagagcagctataaattgaataagcccagcaaacttttcttcgattgtgttggaatatagagtagagaagtagtattgaggttcgcttcttgtcacagaatcttcactccatttgtttgacaaaagcatcaaattggatgagtacagctcggaaacattttctctattttgatccggtcgtatttttgtaatctttttggaatcgatgtttggaggtaattctacgttatctagtttgttagaaaatccttcctctgtttgacttccactgagcatcttcaagagatcgttagtgttgtctttttgttgactattctgaatataactttctttcaaactcttgctgagaagaaccataatattcttcttgttactcagtacagcttcatgaacattataagcagattttgaaagattattcaaaagcagcaaatgaagcttgatacaaactaaatatgagttgatcttctcatcatcaacagagagaatcacggaagtaagtttgttcgtaatcaagtcatctaacttagacttgatctgattgaaaaaaagtgaacagttttctctattagctgaaatcaaaatacccacttgtttcacaacattggctatgctggtattctcttcttcaacattcgtcgcgacaagagatattgttgtagcaagcatatcgagagaaagtggcacgacttcattgaaaagagacaaaaatgagttttccattatagcatcagagaatttgtagatcgcctctgctaacaagttcttggtttgcactttcagcttattgttgctagaggtcaccaagagagtcttgaaaaaaacaattagtgaaagtttgagttgttttgaagttgcttggagccatgctgtgtttctaattcctgttttggagggtatctcgatctttatcctgttagtaggaacatcttcatcggtttcttggctccatagttcatttactgcttccaaattgtctatttgtcgaacatccttgtacagaacattaagggtcttgtcgttgaacactttgattatgatcactttcaaggcttctaccacttttactatcacggtatagtgcaaattcttagactgggtaaagaagttagtcaagttcgacaccatcccaggaagaacatgggccaattggtctgaagacatcttaaaggtagccgtattaacaagaatatcaagattatttataagcaagttgttttcttcctgagaccttggatttgtggcccaagtgatgttatccaagaagaagctaattgaattgcctaacaatgacattctcttgacattagctgtttcaacaaagtagtcgtttggtacggatttcaatatcatagcaaggcaatctacagctgctgctctaaactcaattggtttcgatccactagaagggctagaattggcaccagaaaggaacaacacaatagatagcaattcatccacaaacttctcgtcgaacttgtagctccatatatgttcgactagaaagcctattatttttaaaattgatgtagtaatacgatcatcaattgctggctgcttgaggatattcgataatgggaaaaatatgtaatcagccaagtttggcgaaagatgataaggtattaaattttgggaactcttagtattttctttataatgactgtctagaacttcatgttctgattccaacacctcggccaatcgacggaattggctattaaaagctggtgtatctagcaatcctatatttgagagctctatagaaatcggtttgatcttttggaagagcagtatggataaagtctttgtggtttcgtcataagatgctgggggtaacgagactcgtcgagtcgaatcttctggatcttttgatccaatttgcaactcacggtcgctttgaacggacatttttgcacaaatggctctaaggaagtaaatcgtagtgattcttgctaaatctcccatacttaagggtttggctacctttggtcatgtgatcatataatcgtgacttcgaaataaattggtgctataatttactctaattctaatgagtacgcgtatattttatcactgtctaatcagaaaaattttcaccctactgaaaaaatgcttaactgaattttacatattttgatattcacttgttcttcaacatatcgagactttcgaaacaagagtatgttgcctagtctgtaaccacaagtcaacatggatgctctgcttccgctttcgatttcatatctcctccaaatgggtaagaatcttgtcgtcttgtagaaagttgaacaacttttccactcctggtaaggaatggaggctgtttggatttttatttggctcactagttttcaacaactggtagtctgagacgttagataccttgcccgttttctggctcatgaatccttctaaaggacactcatgtggctttggttaacaataactaccatttatctactagtactagtataatggtggtttttgtatgaaatcgtttccttatactaacttttaatcttgtagccataatagcaatttcatacaatgaccagaacttctgtattagccgatgccttgaacgccatcaacaacgccgaaaagaccggtaagcgtcaagttttgatcagaccatcctccaaggtcatcatcaagtttttgactgtcatgcaaagacacggtatgttttcttgatagaaaatctaagaatcttatttcactagttccaaatttttgtctagttcttttaatttatatagatccccgaattgataactggatggattgatcggtgttcagtccctttctgtcttttaagtattcgggagaataagtgggaaatgcttcttacacggtgctgatatgccaattatcttttgccgtttacttttccttaacatcgggactacaaaaatggattcttggttttgttacagaacttattactaacatttttaggttacatcggtgaattcgaatacatcgacgaccacagatcgggaaagattgttgtgcaattgaccggtagattgaacaagtgtggtgtcatttctccaagattcaacgtcaagatcaacgacatcgagagatggactgacaacttgttgccagccagacagttcggtttcgtcatcttgactacctctgccggtatcatggaccatgaagaagccagaagaaagcatgtttctggtaagatcttgggtttcgtatactaaaagggtatatttgtgtataataataaaggagaaaatagattcattgtagaatggctgcgaaaagaaaatgggagagaatgtagataacgaaaattctgaaaagtgtcaatgtcatgagatttgtaaacacttatagagctcagttggtctgatgttggaaatagaagacagggaatgttcctgtaaatcatgaagcagtaattgataaagctttccagtacggtttttcagagagaatgagaaagcagaagaagtagtatccgagttcaaagcccacgcaggtcaagaggtgacccgaatgaacacattaaacaagatatattgtctagaatgtgttgttttgagtctcttgccacctctatcaatttttctgttccccttcatttgtattcttcactgtggttccacagtaagtaatcctgcatttcctccagatatttcagatatttcaagttctattggatcttagtcacttcttgattccatcttctccagttaaacagttcaaaagagatgaagttgcctgagtcactcaagttcttctactccaccgtaacttggactgtacgagctggttgtgtagcccatttgattcacgaatacgtttatgagttcacagaaaccagaggagaatctatgcttcccactcttcagagccagaacgattacgttcacgctttgaagaagtatcgtttgggtagggatatcgatatgggagattgcgttgtagccatcaagcccagcgacccagaccatagagtttgtaagagaataacaggaatgcctggagatgttatacttattgatccttcatcctcttcagagttgtccaatactccagctgaagtcatacaacacgatggttacaacaagtatatagtcgtacctgaaggtcatgtatggtgtactggagataacttgtgccattccttggactcccgttcatattcagtattgcctatgggtcttataactggaaagatagtagctgcgaattccatgaacaagggctttttctcaggatggaatttccattggattgagaatgcatttgttgaagaataatcatacaatagtattgtatcatatcattaccattgttacccccaacatcagggccataacatatttcataatctaagcatgtggttccaacattcattatgtaaaaccatatggctacagagttgtacagtagtctcaaattatacattgctctatacttacctagtaataatatataataataatgatagctgtacgtgtaagtgcaacgaagaattttgattaccgttagaacttaccagcatgtctgcttctggaaagattcttcaacactctggcaccagcatagatacatggcaacgagagaagagccccgttgaacaaagtggtgaaaatagactgacctaagtagtactgaacaaagttgtattcgtacccaatcaatgacaagaggaaaccgatattgaacaaaagttgaccaccagaggtgtatttcaaggctccgtacaaatcagcaccaataaacccaaaccaggagccaatcaatgctaaaaataaaacaactgctccgccaataaacaccaagggaacaatggcgttgatctgtttgtcttctgttctgaagatgtggtggatttcaggtttgtaaccgattctgggcttttcatgatacttggccgtagccctgaactcttcggtaggcacaatctcaacaagctgtttcaccaaatttttgccggagctagctggatcagcaataatcaacttcaaattcaacttctccttgatcttcaagacttctgggaatttactggctggcaaagagaattttatttcgctagagctggtgaaaccaggaacgaaatgagcagccaaggccgagtcttcaacactgctcaaaaccaaaaccaactgctggggtcttttatccaagacttccttcaattgcaaactgatctcgatcttatcctttggtgagtctacactcaagtgtttgatttcctgggtcatgaactcgccgaaaaagaccgattggtcattgagcttgatggaaccctcagaaatcgtgtatgccatagcagctgcccctaattggcaaataactgcaactataatagacaacttcattttgttttacctgtttcaatgattgctggcctgaaaagaagctcgttcatggtatttttcaggcacgctattttgacgtggtcggttgtatttacagagggcctgtatatagaaatgattaggattgaatttgtaaaattaagtcccaattaaaatggaatcattctgtctctgaggtgattttcaccttctgtactttaagataatggccaattgtatgctctttcatacttgtatccagttcatctaagttgacttcttccagtttttacaatttaagttgcaactttagtcgcgcactaaccgatttctggagcagttctacaatttctagatcgagaaatggctacgttttatggcttcaatcactttactgattgtggtctacaagtcttcttcaactcaacaaaatgtccccaatcgtatccaaactctcgtcaatctttattcccttcttaattattttgatcatactcagcaacaacgatctacaagcccatcatcatgttgtcttgtttctttacttagttgacaccatcaatagacgcatttaaataaaatagaatagaaacagcctacgaggttaaggactcattcaacaccttcttcgcgacattttcaagacgaattgttgtcttttcttccatactttcctgttcttcctcggttcacttttacctaatataataatggtaagttgcaacttcagtcgtgtcctaacctccttctagaaccatacaagactgcaggaagccttgcttacacatttaaatatgaacaatctgaattattatggaaattagcaatacgatatatagttaccgaaggtagctttcgtcaagagatgtagtgatagcagaattggtattcagtagtagtacgaatttgtaaaatttttctagcattcctcaaaactatgatctctcagtagattctgtaacagtagccagagccacaaccaccagaaatgtaccaggatcatcattatccgacacaaccgctagtttttcctgtgggatttgatccaaactttgacctatgttttgtaccgtttcttgtgaggcactgaccacatgatatccatcatttgtggtttcctcattttcatcaataatttccaacttttttcgcaaccagttctggcgatattcgaaagtctcttgtatttgacgatttccaccagttaatgagaaaactaggtaaccactggtcaccaagatactcatcaccaagataattggaaagactacaaaaactgcataattgttagtattagacgatttgcaccatgaaaattgtgttactcacctattgcaaagaacataactaaagatgccaacaccaagaatgtgagcaccaacggagaaagggcaaacatgaaaagagagaagaaggcagatgcaaagaaaaccaaaggtaagagtatcaagattagtggcaagtatacaaagattgcaatctagaatatgttagtgaaatcaggaatttaactgagaaacggtgatacttactagtgctctcaaccacaagttctcttcaaccagttcgcaggtgttcaagactgctctctttgccaaagaaaagaaaggaacgatgtactctatgataaacctataaagttaacattctggccttgttgatagtagaaattctggtaaaacttacttgaaaagggaattcgcagtcacagagttgactgataactgatagagtatgtctgagaagaaatagacaacacgggcaataagttcagatgtagtttcctctgcagttctgcagaaaaattgaagagtattgaggttctcttgagtttgagcttttgaatctatggtttgttgtgtagtcttgacactctgagtgggtttctggatcctgctaacgtgagtgaatctctgaaatgagctgtagaaatcgtgttttgcttcgttcttcttctgctcaacaaccgacgttgaaaacatcttattgtatacgttgtagatatcagtgttatggacgtagacgtacttgttgtagtgtttgcaacaaatagaatactttgctactgtcatctatgaacagttgtatctatcaacagcactatctacttttgaatagttcaatttgctaccgaatagttcaaactgttctgaattcaaataataatagccactaataaacaattgctcaaaggaagcgattttaggaaagaaaaagttcacactttcaatcagtaataaagtaattgccaaactgatctgtaccatttttttgcaacacgatcacgtgaacgataggcgaaataaagctaaactgagatgcgtttttgatctgccattcattttgtgcccggaggcactggaaaattcaagtattgaaattgttccattcactttcttcagccttcaacatacgaacttgaatctagaatgcaattcctaaccgctacaacgttgctttatgtgcgggtgatatttctcaccaccgtcgcctatcttcttgtcaaaaaccccgagactattggtacttctggcttcgtcattttgttaggacaagccatggaagtgcctattgtagtagccaagcccgagaatcctttattgggtgctttgtcggttatttttggttcattggccttgtctgacttgattcctttaatggccaacaatcttgaatattttgaaacgatagttccatccaggttggctgtatatttcattctcgcagcctatgggtatcttgtcaaggaatcgattctcagtaacaactggatcttcacctattcgttcattgaaatctggttcaacttcttgatctataacaacttgaaggatgagaaatactacagaatgaagaagttcatcgaggagaatggcgaagccatccagaaggctcacgatgaacaggtgagagtggttgaacttgatgattagtacactgacaaaatggttagtgttgagttaagttgctagtcccatgatatatgacaagttattcgcattaactgctgcatttgtatattagatagaacgtatagctactttgtatatacagttacttttgtttattagatatactagtttctatatgtttagttatccattgacaaagttcaacaaagtccaatccaagcattcctcaatctcatggaaatcgttgaagttgatctgtagcacattaactccattaaagttgttcttaaaatcatcttcgcacttgaacttgatgacgttcatgttgatgatgagattcacaaagatttcgttggtggtcaactccaagtcaatcttcaagtaggcgctacgtttactcttcaacacgatattaaacttcgatactggtctttcgatcgatttctggaacgggttttctgatctgtgttccaaattggcaaacttgtctacctgcaatttacactctagactttccttgaacttggctatcaatcggtcgataatgctctgcatgtttttcaagttcaactcgtgtctgatattgccgagaagtggacgtagtaccaatggatgtgaattcagctgtttccacttcgtcaacgacgtgggaatcttttgcttcaacttcaagttgtatttatagtaacagcacaacatgatcttgaaaaactttagtatcaattgacacttgccattattgatagaagagtaagcgttgatgttctggtagtagttattcaactcgtcatcgttgttctcatcataaactacagactcaatctcgattatttcattgttgatctctataatgatcttgttagagataattgaaacattgtagttgatcaacgtctttgcttctcgtgtcaactggtagaacaaatcttcctcaaagagaaaaaatcgggctttttcgatgtcgttgataatttgatctttgctgctactgaaatcgttttcaaacaaagactgtccagtaagcatgaagtctccatcgatctcactaagaatcttgatacgaatgtatcgaaacaccttcagtgtaagcttatgtgcataattaatgggattgaacgaaatttcacccgtcaccgtatccttacgtaaaattgctaatcccttatcgtggaaattagacccagaatcaccatacccatacttgactcctatggctctggcattgtttaaaggatctctagtcttaaatagcacttcatcattcgtcaagacggagttaatcatgttccaatagcgtctctccttcaaaacttgttcattcaagttttcgctggcttctcgaaacaagctcgtaactttgtgtagagattctaacttccagccatggcccactttgggtgtctccttcggtgctaccgacttgtttctgtcatcatcgtcattttcatttgataaacgatctgaattcaatgagcccaacggcacactcttattgaggtgtggtgatattgtcgacttggccaagttgggctttactgaagatataagcaaagagacaaaatccaatgacaacgacgtctcgtttaaagcactattgatgcttttagacaagtcgagcttctgtttctggaacaactctacaggatccaggctcgtttctgcaagtgtagccatcagaatcgagccgttttctacagactcatccccaatgtctagttctgatgctacatctacctcattgttagcttcatcttcagctcgtggattgtcgatctcttcttgaagagactcctccgttacattcaagaacgagtttcgctctatcaatatccggggaatcaattctgctatcgtgagcttgtctctgttagatgttagtaagaatgtagaagcgacatttgaaacatattatgcatactcatcctggataaacggatccttgttcgcgtctccatacgcatctggatccaaatctatatggaagtggccattggagaacatttttacttagaaaattagaaagagtatggcagcgaaatgaatattgaattgctctaaaatggatatattgatatttgcgagattcaaatttcaacaaaagcacgtgacccataccccagaaaatcacttcaattctactttctacttctgaactacattctcattaaattattcttactctttattctttctatctagtccaagaagtcgtccaagtcaccctcttcaatggctctcattatgtccatctcatcttcctttgactcattcttaaccgcatctgccttatcatcactatcattaggatatctcatcgacttgacgctatcattgtgtaaagataagcagaacttgattctctggtcaaactcgttctgaggcaacttagtcgagtagacgtccaataactccttggattgcataaaccctttctggtggttgatagtggcttctataactccgtctctgatcgctttggatacgatgtattctgtcagttcttccgagtccaagtgcaacttgatacagatatcctttaacagaatcttggagtaggacaatgagataattctgatgcctgtttttatgacgttctgacgtaatctcgagaccaatgtaaaattatcatcgcgtttgaatacagtttcgtacttgttcaaaacttgaccaaacaatttcaaatcacccaatttcacggcctgggtcacatagaaatatggctcaaaagatcctgcttgcttatggaaaactttcaactcaggaatgtctcccatcaacaattcgatcaagatccgcaacttgcttgcgctctggatgaatccgttggccaaatgggtctgtggcgcctttctgatggcagcaatgacacattcgtgggctgtggaatagtccaattggatggagttaattcgagctaaatagtagtagtatctagctacaagagcatttccagcattttcgggaaactctgtcttttctactaaattagcagcttgagaaatgtcgtgagacaacaaatagttccgtaacaagagggttattatggatgcggttgtttcggtgtcgtgtctcaaagtggcagttctcaaagacgataagagctcgggacgtatcgtaaccaagtcaccaagaagctccttggttctggcaataaagaaccatatcttggcctggataaagtcaagcgatcttctattgtagagcttcatcaactggatgatattagcattgagcgtatcggctttggccaattggttggtatccaagagatacacttgtactagcaaatgcacatagagttccgcttctggagtctcagcattggtagaattgactgagttggaagaagtcgaatcgacctccatttcgtcggccttttcagacttgacattttcttctgctccaagtgcttcaagcaaatacaccttattggtatgagccgatgggtacaatttggcgacaacagaaggcaacacgtcgtctgcggcacgaatcttccgtctcaacggtcccaagtcacggaacactttggatatgtatctgttgtcgtaggatgagccagctttggacaacaacagaaaggattggtcgatttctttgagaatggtttcatttgtcgaggcagagggcgctggctcctcagcagcttctttcatgtgtacgtctttgtcagacatggcaattgaggatgatgaaccgaaagtctaaaagaaagagaaagtataggattgaatgaaagagtaaagagaatctgaagaaaaagaatattgataaatcaactctacagaaatcataatattccgtcagttgctgaatgtatggagagtgcgaaattgccactggtgtcgactgccagattgggtagtgtgcggcaaaagcgcttaccaagcagaaagtgtccaacgaaagataccactacacagccagatcccatattctatgggaataaaaagatgttgaaggtattgaagaaattgaatcttattcctcggcttgagatattgcaattggacttacgaagtttgtcagtactattggattctcctacgaagcgcatttatcagagatgaactcgagattctaggtttatacaaaccactcatagtctctccaatctgtagtagttcaattgcctctgtgtgccaataatctcaatattatctatcttgtctttggctctgagggatcagttgccttactcttaccttctattctatcaatttctcaccttccagtgctagtttctcgtaaacttttcgcagcctaattaacgagcactcggacttggccatcagtttccgaaaagaatcttcctacaatgacatgttccacaagagcgtatactatccatgatgtctatactcgtgtatgccatgtatcgtacttgaacatccatccttccattttaaatctttccatcacgttctcgtagtttgtaagctgccctaaccagcaatatgcacgaagattgctaaaccccatccccacgaaagtggcactatataaagagtgaaagttcccctatttctgacagccatacattttttttctagcattgtctttctaaacttagctatcgtcaattcctttttatctttaaatccgtttaattatagaaccaaaatggtcgcctctacccttgactcctcaattgcccctctgcttcctactgctcccaaaccggtaccagtatttactttcaacttaaaacttgccggtgagcctagcctgatatttgtctcaaaagagcaagacaaggctttgtctttagctacaattgctgatggtgaaatcagaactgttgaaaacgagttaggtttggaattcgacgtcagtggtatcacaggatttgacgacttgaatgcgagaccttcagtcaatgctgcaaccttggattgtaagttgtatggtaagactggatcgggagctggtgtctacgtcagatatggaggtgtggttcagtttttggaaccatctcttctagtcatgtcaaaccaaaagccaacttcggagttcgatgaatcgtacgtcacctgcaacccaaccttcaccttcgatctgaatgttgaagaaaaatatcaatgggtcttgagagagaatttctttggtaagggacgttttgttagagactctgctggtgttcttcacgttcaatactttatatacgttttccgttaagagtgaacaatgaatgaggaaaagagcatcagataattcaatttatatggatattcacgaataccttaccaagagcctctccaaaaataactgtagatctgtaatcttgtaaaatagcaaatagatcttactacactctctcacaatataatcatattacctaaacaacttgtaacaacagtatatactagcaaccgatccgcggaccctgtgattacaataatattcttcttattatcatcattagtatcgaaaactctacaactgggtctattcaacaacacgaatttgtttggccagaagtcaacgactggcccctcaagttgacattggacttacctgcgttggcgccacttgcagcgttggcgttgacgttactggtcatctgagccttgatctgtctagccatggtgtagaaggcctgttcaacgttggtggacgaaagagcagaagtttccaaaaacggaatgtcaagcgcatccgcaaactccttagcggccgtgtattcgacaatcttcttgtccgataagtctgccttgttacccaccaacaacttcatcacgccgccagtggcataacggtcaatttcttggagccactgcttgacgttgttgaacgattcttggtccgtgacatcatacacaatgatgatcccgtgagcacctcggtagtatgacgacgtgatggttctgaaacgctcttggccagcagtatcccagatctgtaacttgatggtcttaccgtccaactcaatcgttctgatcttgaaatctacaccgatggtggaaatgtagtctggcgtataggtgtcatcagcgaatctcaaaagtaagcatgatttgccaacgcccgagtcgccgatcaacaacaacttgaataaatagtcgtattcgttgttcatgatgttacgagtgtaattagaaccggaaaactgaaaaatacgatgattgagattatcacaaaattctgaaaatcaaaatcaaatcacaatcaaatctggagattgaagattcaaaactatctggtaaattcctaagaagatgtgactggtaatctaattatcaaatgtttcaaactgatatcttataggtgtcctggaaaccttttctagatgcttcagtcgaactctatgacagatgtgttttggcaaggggcactctgaaagataaccacaggcaaagaatgcaaattaaagaagcacacaaaaaacggtaaaaaagtgaaggattcgtaaataacactcgagggctatatacggcactagacgggcgaaatgtttctctatgtaagtaacctggtggatcttttgatttcaaaagaacaagataaagtcatgtatttattgtttggcttgtttgcctcactgagaaaaaaagactattatcggttttgaggttcgtgtcgtttggaatggtacgcacactaccatagttaatgtgaagatgagttgtacaagtggaactggaacggatagtagtggttaatagagaagggtggtttggcttagctggtgtaggccaattgcatccttaccagcgatttcagacaaaacttacttcttttcaaacggaaatctgtactttagtttcagtggcgctaccatctggtgaaatggtaccagtttcagtgtgataagttggaaatggttggtagctgaattattatatttatagactactgcttgtccgaacagacttgaaaatgattagataggatgtcggctactgtctctactacctcaacaaataataaagcaaaacatgtctgcctaataatagaaatggatcttgaaattcatgcggcgctaccagctcaacattccatcaaggcttgtaacctacgctaagaactactttcgtttgttcatattatgttgttcatttatatacaaatatgtcatacatattcgatatgagacattgagggaatccgcggacaaaattacgctggaattcacaattgtagtactgtagaaagaatcttaatttatagattctttatagatccgtagatctactcaagtttcttgtggtggctcttgccaaagatcttcttcttagcaatcatgaccatcttgtagaaccagaaaacgttcaagctatccaacatcaagttcaagcccaagatagttacaggcaaaaaccagtgggttttaccaaacacagcaaacatatccgtcgccaccataaaagcagcgtagaagccccaggcaattctcacagagaagaacgtgatcaagagacccaagccatttacaattacaaatgtgtcgttgaaagttccagctggaagtctagaagcgaaccagttgatgttaacaaaaggtgtagacaactcaaagagaaggaaggctgggatccaaggctggcagtacggaattaaactacaagaaaagacatagaaggctgcaaagccgtggaacaagaagccgaggccaaatagcgaataccatctgacgcaaacgtacaagtcccaaaggaagtagcctatagtcaaggcagctacaaagcctccgtagttagaggcgcccaagatggagctgaaaggatcttcaactcggttctgccaatgggagtggttccacattggaatcaagataccaattgatatcacacattgcaccatagacactacatggatgtcgaagttgactttggtcttgtgaggcaactgggtataggttttgccgaaataagctgttgaaaacggagccagcaacaactgggccgtgaagtagaacaagaaagaggcaaggacctcatgccagtgttcttctaggaagtttgtagggtgttcggggaatggtcttaggctgaggaacggatcttccgtgaacaccggaaaatgagaagtgatgaatgacatgaaacgaagatgaatgtaaaagttaaagaataagacgaaatctgaaaacacgaaatatatatgaaatgtcaagtcgtataaccgaagtattctctagaaacaagctcagctttttgcctaatcgttgggattggagatcaaattcgtctacttgacgttttcctgtccacagactgtaccaattccctttcgcgatcctcggccagtcttgggcccaacaaaagcgacttcacatggatttttgtcgggctgtatcagtgcatttatagggaccagcggtattttgatcaagttggatggttttgtagtgtcagatttgacttcggttgtcgcaaatggtgtgagagtttgagatcagtattgagtgccctttttgtctattttggcaatttacgaattctgatacggacattttcttggtattctcagcaattctacaaaaacactaaagctgaacaatttgaataagtaccagaaatgacaattgctagcaggaataatataagactctgacgaagtgggaaaggtcggaacatccctcaatgtcaagaccgtctctactttttctctttcagtttacactatataagtgcactaatatgatgtatcactttgcagccatatcgagcacctataatagctccaaacttttcgcagccattttgccagagacttaatctgatcacttctcatatttattctagacctattatctgtatacatcatttttacgagaagttcctacaactgggtcctggatcgcttggtcattcgcttacccctgaataggcccatttgtctacattgtttttctccaccatgccaacagctgcaataacgcaaccaaaatatttcagcatctgcagcccactgcttgagacgaaatcttttaatagatttgtcccctctccttctctcatatattctctccaatcttctctcggactttctatcaggccctcctcttgatcctccttcctgcctgttgcgatccacagttggttttgcatcatctttccgcgtgcacaaccacggtgtgaaaattcgaaaatcagcgactgaaaaattcacgacataagcttagaactatgctcaaatctctttcttattcacggagatatttccacaccactatcaccaaaatgtcctaccaattagttgccttgggtaatccacttttagacttgcaagtcaacgtcgacgctgagtacttgaaaaagtacgacttgaagtccgacgacgctatcttggctgaagaaaagcacttgccaatctacgatgaactcatcaagaaggacgacttagtccttgttgccggtggtgctgcccagaacaccgccagaggtgctcagtacattttgccagccaagtctgttgtatacttcggctctgtcggtaatgacgtctatgctaagaagttgaatgaagccaatgccaagtacggcttgagaactgaataccaaatccagccagatattgaaaccggtaaatgtgctgcattgatcaacggtgtccacagatcgcttgtaactgacttggctgctgccaaccacttcaaagctgcccatttggacaagcctgagaactggaagcttgtcgaaaacgctacccactactacattggtggtttccacttgactgtttcgcctgaggctatcgtcaagttaggtaagcatgctgctgaaaacaacaaggtctttaccttgaacttctccgctcctttcattgctcaattcttcaaggatccattggacgaagccttgccatatgttgactacgtcattgccaacgaatccgaggctgctgcctacgctgagtcccatgacttgggcgttgatgccaaggatgtcgttggaatcgctaaggctgtagccaagttgcctaaggtcaactccaagagaccaagaactgttgtcttcacccagggtcttgaccctactgttgttgtcaagtacaacgctgaaaccgaagactacgaagtcaaggcctacaaggtcagagaacttgcagcagaacaagtcgtcgacaccaatggtgctggtgatgcctttgctgctggttttgttgcttctttggttgaaggtaagaccgatgctgaagccgtcgatgttggtcaatgggctgcttctctctccattcaacaggtcggtcctactttcccattcccaaagcaaacctaccctggtaccaactagattgacctggtagattagcttagtgttctgcaattggcatataatttttttatggaatctttatggtgtttcacatcgcttcatttcaacatgggtttacttctcggttcgtttctgctggtcaattgcagctggcttacatatatacatagactgcaatcttaattcaacattgttgcaagagtggatgtagtttctctttctactagtaatacaatttgcttaatacaatttgctacactggtgcttctttggtagtctcacagagagtgaatcaggaaaaaagatcggactcagtgagatttcaatcccccccatgaaaattttgttcaaatcatataccttgtctgtatcttggtcttgtttcagctctcctagatttctgttctatctaatatatcatttgaatcttctcttagtcgcggctcatctcgtttccccatacttttttcaacctcttcgcactgtaaaaaaagttgtcgagatgagtttttcgcttgtccaaaatatctgtagagattcttcaagtgaagtttacgtccattggatcgatttcactcgctgagtttcgtcgagtgtagcctactttctcaaatgtcggttctgaaggatcactactatcgtctttcctcagaagttcctcaggaacgaatcgaggctgctactgctctcttgtctgagttggcccaggtcaatctcaagcctgactgggactatgctttgaacagattggtcaaagggttgatcaccaccaaacaaagtgcacgctttggcttttccatggccttggtcgaagttgtccgtgagttgatctacagaaaagaagaggaatacgcggacatctccatttcttcctatctcagtcttgtcttgcataacagccagctcaagtcttccatgaagggaaaggaagaaagatcagtcctttttgggagattgtttggtttgcaagttttgatcaactcgcaagttctccttgatccagaactaatcgctgacgagcaaattctcttcaagttcatccatgctcttatagagttgtcgggattgaagtcgtggttgagagaaacagctattttcaccttgtgtcaattcataaggttattgaatagcgaagaatgcaaattgaatgataacttgaagtcaaaggtgttggtccagattctccaggacgtcaacgaccaaggtctcaatctttcaacagaaggtatcgcagtttatctttctataccaaggagccagagacagctacttgctgaaaaagtcgtttctccaacagcgaactggaaacatggtgacccatttgcaaagggtaacttgcctgtattagcaaaagctcttaaagatgtggaagtagtagaccccgaagacgacaccggagaaaaaaagcaaaatggcaagggcaagcaacagaagggaagttggtctcccagaattccatttgtatgggatttcatattagagaacttcaacgaaagcaatccttctgtttctgaaacagaggatgaaacctccaattccaaaaagagaaagaagcactcacactcacattccaaaaagcaaaagatcgtggacgacgagtccagaatctcaatgaaggaatttttcaaagtagtcattgatgagtccttcttctcagaaaaagcatctcatgaaagaaagtactggggttttgaaatctttatcaagttctttcaaaatgtgcacctgggccaagttcaatatctcttctctccaaatctcatgaggtgtttgatcaaccaaagctcaaagcaagaccgaatgttgaataagatttcaatcaaggttctcgaatctataatcgaggaatccaaggtacatccttttaaggctccaattgcagtatcaaacttaaccaatgaatccgtaggaggctgttggaattttgatcttgttaccaaatccaaaactgtagatagccttctatctttattcggtaaacaaccagaagagtctcatgttactcatcatgatataattttattagaattgaaagacgttttgcaatcaaaattcaaggcagcattggaatcacaagaaactgattccgaagaatctactgaatcgttcaagaaatcaaacgataacatattaaaatggtgtttggataagttgttgcttttgattagagctaacagaaatgttactgaagacaatgatgttgaattcgtagaagatatcatcaagttgttgataaagtactcattctttgttccggtcaactccaataaagtgtctataaacattagaaacatttgccaggaaagactcaactccattttgtcagacattatcaaccaaagaagaccagataagagctcttggtctggttactgtgttaaatatatcactaagctcgaatcttcgtccaaatatcaaaatttggtcgaattggacgaagagttgactactttgaaagctgaaacgttggataccttggcttctattgatgagttcggtggaatgacacaaaacccagccaagaaagaccaactttactgtttcgaattgatgttttcgttggtccttgttcagctatatatgggagacgaagaaacagttcaagttcttaacgaagtcaagctttgttacgaagatgttttcataggcagagaagatgaacaagaagaagttgacacttcggttgttttgaccgatataatcttgtcttttgtttccagaaaatctaccttgttgaagaagtttgcaaatattgtatgggaatttttcttgtgtgcaaaagatgaaactacagacagaataagattgaatgaagatagtttgaagttgatgtatgacgttttatacgccagagaaaacaaacagggccaggcaggattgtttgaaggagacggagaatttgttgaagaaggaaaagacggagagggttctcaagatgaaaacaaagaagatgaagacgacgaaaaagaagaggaatctgatgaagacgaggatgaagacgaagatgaggatgatgacatacaaaatgaggaaggtgacgagtccgaagattccgaatctgacgaagaaggagtatccagagatgatgccttgacggaattggaaaaagaaaccaatttaaagttggcaaaagcattgggaattcctaccgaagaatctggagaagtgaaattcgacgagttggattcttctgaagatgacaactatgaatctgactctatggacgatgaacagatgatggctatggatgatcaactttcaaagattttcaaagagagacaagatgccatttctactcttcctagtggtaacaaaagaaaggccgatgttatggaagccagagagcacatgattttctttaagaatagaatcttggacttgcttgagttgttcaacaagacccatcccaactcactcttgaacttgaccacaatcaagccattggtttcgttaatcaacttaactatggacaagaatctcggggttaaggctcataaattgttgaagacaaagattagcaagacgaagatcaatgacttcgaagtctactacgccacagaggaagaacaaaagacttacaaggattcgcttcttgatctcatcaaagaattacaacacaccgccagtcacacgaagtcatcaaaccaggcccattcattggcatgtagccaagcatgtattacgttgtcgaagaatttaataaacttggatagagcatatatggagaaggttctcgatgtctactctgtttcattgaaggaatgggccatggattccaacaacaatcttctgtcgtcattcttctttgattttatcaactggatcaacgccaaaagatagccatagatagagtcttaaatagatttagaatgcactgtaatattagttaagttgtgaagaagtgtaggtttcccaaagacgtataaactaagagagacaatttataagggacacaagtttaactttgcacaacatttaccattctgactagattacagttagctagaggctatgaaagtgttctctgttagtgcagaatcatgagctaactaatcacgtataaagtgtctagtaagaaatcgatatgattgaagaaattcacgtgacttgaaatattattagttctgaattgtacgctaggaatctcatgaaatctgacttctgcagtaattcacataccactctccatccaatgaaaaatgcgactaaacccgagattgaaatatatgaaaaaagaagttaacaaaatccatacttctactactttgtctacagaaatcaccacacacaatgtctgcctacaaacaagccggtatctccttaactaaagccatggccattgctgccagaactgtgagaagttctttgaagccagaattcaaggctgctgctgaaagaagaggtgtcactgaagccaaggtcatcaagattgaaaatggagttcaagccgaaccaaagccattgagccaataaacagtcgagtttagagatctgaatctgtagagaaaaaatgaacgtatgataaaatgaattgaaggaatgaagataaaaggaatcgtgaatgaatcgtagattatgttcatattcattttgaagattcattagttcgtggacgtcataaattcaattatatctcaattcagtgtccttcactcagatagaccgcaattgaattgtggtctgtttcatatttatgatttatcctagtaatgataaaaacatagttgttggtcagtttcgctgccagtgcttatagaatagattatttcaataaaagattttacgttaaaaggagtgggtactgtctatttctagcccgtaataaatagtgctttgctatatacaaagtatggtgtgtttcaccaagatttgatgatgatatcatctgatttgtgatatgcgatgaatgtagatcatcatttgataagagttcatttttcatcttaattcatcaggagtcaacttcggattgggtaagtccagatctgcctttttactttcttcaactatttgctcaacgagctcgctttgattctctttagattcgttggacatttgttccaccaattctttcttcaactctaatggcaagtcgtctatgatcgctttcaaagattccaacttgcccaatttctgggtaatttctaacaactctgtctcatggtttatatggtcttgctgttcaatctcttggtctgaaagcttttgttcctgcttcaagttgctcgattcgtctaatagtttggacaactcggagttggcattgctgaacaactcaacaaatctaccctgttcaactacgttaccgttcttcccaagtaccactacaaactccgacttagaaattgtcgacaaacgatgcgcaatcgatattatcgtcatctttccttgcgatgtgagatccttcaatgtctcattgatcaagctttccagcttagagtcaagagctgacgtggcttcgtctaatattaatactgaaggttttttgatcaaagcccgagcgattgcgattctttgcttctgtcctccagacaaagaagctccacgagatccaattaacgtgttatagccatcgggaaaagcttctatgaaatcgtgacagttggcttgtctagaaatctcaattatatcatccatggtgaggtcgttgatttcctgaggagtcaaaccgtagacgatgttctccaagatacttccagacaacaatactggctcttgttgaacaatgccaatgacctttcgtctcaattcacgaacttggacgtccttgatgttgacacctcctatagttatttctccttcatcgatattgtaagatcttaagagcaacgcagctatcgtagacttcccacaaccagaaggagcaactatacaagtactggaagatggagagatcttgaaactacagcctctgaagactttatcagtaggcctagtaggataactgaacaccacgtccttgaactcgatgtcatttcctatccattggggaattttttccccggttatagccggaacctcgttgtcatggtctattaggtcgaagagtttgactccggctccagctcctttcatcaactccatataggtagtggttagactgtataatgacaggttgaacaactccagatacattgtgaaagcaaccacatcaccagtagtcatggacccgttcaatatcaaatacactcctaatgctatacacgacaagtaaccagtgtggtacaatccgtatatggaaaccgagtagtttgactgagcaagagcttccttttttgctaccttgactacttgacgaagttgatctgaatacttggacaactctttctgttcccctgtgaatgcctttaccaacttgacagcattaagcgtttcctcactgatttttgtgaggccagccgttgcattctggagtctggtagaaagttctctgattttctcaccataccatacagagcctatcgtgataggtggagagatcaacaacatcacacagaagaggagggggttgattgaatacatcatataagaagagatgataccaaacaagaagttcttcaatccatcgggcaagttactggtaatggatttggaaactacataggcatcactcgataaacgagatatcaagtctcccactttatgtttctcctggtcgtagaaagctgcatcatgtcgcaacaaatgcttcataacacgaagacgcaatctcgctacaagacgttctcctaaaaccttcaacacccagattctggcccagaaacacactgcactgaccatcatgaacggtaccatgaaggtgaacactgtggaatacttatatccccagatgagcaaatctccatcagcatctatcacatgggagttataagcatctatggaggctcctactaacttcacagctgttgttggatacaagacagcgaataaaatgaatgctaaagcatacaagaataacctcaaatctggtttacctaatcggatgattcggccaatagtctggagattctggcgaaatgactttttgctcttgatttgctccactttctcttcttgcttgatctcttgctttttcaatcgggccaattccaaatgggcattgagcgaattggacaattctgctttggatttcccatctcctacatctttatgtatatctttcgaaatgatagatccagtcgaaaacgaccgtatgctgacaaaattgtggaaattcttaggatgtatcacactattcttcaaaatcgattcattgtatattactgatcgctttggaaagtttgaagtagcggaaagccgacttttcacttctttgtccatatgagacttcggcttcagaggaactgggtatttgctgtagcatgaggtcaaagaagaaagtccgcgcccgggcggagctacccgtatacccacaactactgaggatgtccaggtccgtattcctaacacgtacaaagacatatccgggttctgggtttgtggaaagaagcaagacttcaattgtaaaactcgacatttcttcattatgtcataatgggctcggacgcagttcggaccggcacgtgacgttgataaagaaaaaaattaatgggtgcaaaaaaggagaatatttgcagatgggagatcaacaattcgttacaggatataggccaaaaagtgctcactattatcagatatgactacagacccactatttataactatatagttagtacaaaaatttcctcagtttatattcggtgtaaatgacaaatacagagccgcctacactatacatttgaatcatcttcattagactcacacagctctttcggcaaaactttgaatcatgcccacttccgactcctcgtattccttgacttcaacagtcttatcttcaccaataacggtgttggcctggatcaactgctgtctaggcttcttctttctgattacagtgtctctgaaacgagcatagtcgtcagtaatatcggttttgccaatatagtatggaacaccttcagcaacgttagcggtactcttgtagagagccaaatgggccaagtagtcacccaatgcttctacagctacagtatccaacttggactcgtcaacgataatctcaagatcgtcaaatgtcttttcgtccgtgtacttaagagaaaccacaccagcagtgtgcaacactttgaagatactgaatctggcttgcatatgaggctggccccatttcttagtctttggatcccagtattcgagtgcaattaaacctgctctggccattaacaaggtaccgatcaacttgaccgacttctgtgcctccggcagagtgagaccgaaaattggcaagacttccaaaggcttcttgagaattaagtagagagcaacaagctcagcacgacattcttcaaaagaacctgaagtcgtaccgaaaagagaaccccaggtatccgtaggcttgtaccaggtcttggtgttgactttttctctgtcgaagttaaacacgccaggagctgtttcctgtaacaactttccagaaccatgtcccaacaactcgtgcaaaccaacctgaacttcgaaagcttcttctctccacttcttgaactcggcctggagatcttctgtgacgaagggaagaaagtcatctttcttgggtttctttgggttggcagaaagaacattacctaatgaaacgttcttgaatccaaagttcaatctgacatcgtcatagttaggaatgttgataccagctggaactcctgaaccagcgaatgtgagaacttccaaagaggtaaaatcaggaggggtgaaagtgtccttttcatacactttatcccagggcaattccgacaagaattcgccagcgcgattgactaaagtagaaaacttagcagttctatcgtggttaaccattgctactaaaccttcccattcccctctgacaccggccgggtccctgtaggtttcaataaatccgacattcgattcgacttctggcttcaaatccttgacccattcgatctgcgatttcttatgcgcattcatagacccggttttgaatgattcgatataataatcaatcaacttgccctgggtctcgttggctacgtatttcttagcttctacaaagttctcaacgatcttaccaaaaatgtcggagtgatctccaaattgaaaggtgatttgtgcacctttttcggaagttatggcattttttgggtaataatcagtggtgttctcagtctcagcactggccacatggacaacaaatacaccatcagctttcttttccactctggtattctctggcatgatgccattagaagccaaagcagagtttacgtcttctatctcttctctagtaactttcaaggcaccaggatagtatcccgaggcatgtccactagcagtccagcccaacaaagcagcatccgtagagtaaatgtcgtcgcggactttcttgtagagctccgataccttggcattgccaacgccatcgtagatgagcttgtccaatctttccactggcaatctggggataaatttcttatctccaaacgacttgtagttgcctgtgttggacaagaactgcgaagcgtactccaagtagtggatgacgtcagaagaagaatcagcgacgttcttgcccaatacttccacataggcttcgttggattgtgggctgcccaagacagcatggatctccaagatcaagtcgtagatattttcactttcaggcgaaaccgatctcaacacagcacgcgtaccccaatgagaggctctggaaagatagtgagcgtacaacttggcattggcagtggacaagtcattgaagtgctttttggcagataacaacaccaaaggggcctctgagtcggcgtaaaacgtggcgagagacatctaggaagtttggtgggaatcgggaagagaactggaggaaatagtggaattctagcggatagttctagatttcagagtgcggtgagaaaaaagtgtggagtacttctgaaactcagctaacaattgcgacaattctgacaacgattggataattgaacgagtctgatatttgcacaacttatagagtgaatatctagaatatctgtatgtcaatggactagcaccagcagtatctacagcatgagattaaaggaagtgtgaaaattgagcgccactcggttcttttatagtagggacggaaacggtgcaacatttgatgcacaatgaggtagaatgtcgcagattgtatgcaaattggttatatatggtaggacattccaattgtctctcttgtcttcaactggagccagtcaattccagtcaatttcagtcaattccagaccgaggtgtacaaaccgtggcatgctatttatatgggctatacattaagagaatcggtaaatttaagaagtgtagcgtaggaacccgtataccttctcctagtatagcctgacagagtgaggcaactccatgccgacgcgacattttcgctcataaatgtccccagatatttagggccgtatacctacagggcaatgaatggctcttttctaccgtctggagaagtggcattaccgttaaattgtgtggaatggctaaacagaagaaggtgccggaaccggctctagtcaggtccaaaaataaacagactgataaaagatcacagaaacaagaacaagatctacaggaagagcaagacgagatgagtgaagacatagtaaaggatgaacatgtacgaaataccgataaggtcaaagaagcagacaacgtagatcaggatgacgatgaagatgattacgatgaagaagaggatgaagattacgatcctgaagcagtagttgagactaataaagaagacgaagaggacgatgaaaaagcagagaaggatgaaaaagtgcctgatttctcagcaatagaatctgctactataagtcaagttaggacgaggaatcaacgactacaggagcgacaggtagtgcagtcaaggtatattggcagctttgaaaccgattctctgggtctagtaccagcgcccagattaaccgtagatgtagattccattttcaatgagatgaaggaaaacacgctaaatgatagtagaccagactggaaagaatcgataacaggagacgaaggcagcaacaaaagttcaagtgacacaggtaaaaataaagatggtactctcggaccgaggaagatcaagatccagacctcatatgcctttgctggaaaactcattactgaaacaaaggaggtcgacgaagactcggctgaagccaaggccttcctcaactcgacttctgtagttgcggctcaggattcagatgaaaatgctgtgaggtcgtttgttcctgtgattcgtaaaattccatcaacaggagaagaagtagagttgcgcatcaaattgaaaagaccttccttgatagacaagttcatgtctgcccacggaagcaagaagctgaagttgtctacacttgagaagtcgagattggactgggcaagttttgttgatcagagaaagatcggcgatgaattgaagctacacaacaaagcaggttaccttgataaacaagatttcttgggacgagtccaggaaaagcaggatatcgagtaccagaaggcaaaggaggaggaaagactgcgccaatggctcaaacaacaacagggatagacaagaagttagaagactattgttttagaaaacttttgaattctagaatctgagaatgctgaaacaataaagaaaccaaaaatgtcgatattaggtaagaataacagacttcaattatcatcactattgtctgaaatattctgactatattaagctattcaccatgctctagcttattacgattttattccatctcttgtatatagtgtatattagtattggaatctgacgaaaactctttcaaaatctccacaatgaaaatttaattcttctctcaaatcttcaatgaacaaaaccaaatcataaggaaagtctagtacgtgcatttgaagatatattctcttacccaattcgactcctactgctacttctatgaaatgattgtgttccatctcttgtttaaatcacgtgagcgactcgccagacgaaaattattataattgtaaattatctgaaaactcaatgttactttcaatccttttcttttttcatctggtccagcgagtatgtcgtcaaatagcaatatcttgaaacgtaagaacgacgatctcgagtcatccgctggagatcaacttaacaaacgtgtagcccttgattctgaacagttggatctcaatgtgattcaacaagaacaatcacaaactgctccagccattggctcctctgttactggagaggttgttgagcccgtagaagtttccgcagaagcaattcacgaagcctcggccgaaaagaccgagactgtggccaacttggaggacgaagatcagaacgtcgaagatgattatgacccatctatcgatatcaatgtatctaacaacaacatcaatgacaataataacaatatcaacaatgatgtcaatactatcactaatactaatattagtaatatcaatgctggaagcgatgccgtaaatgacatcgatgacgtttcttcgaactataccaactaccaacacgactcctacggaggtagtgaacatgctagtggttcaaaacctatctccaatcatcgggaacgggatagtgacccgacttatgtgctgatccgaatgtactgtccggttaaggaggccagctgtattgtggggaagaaaggtgagaaaatcaaccatatacgtgaaaaagcaagtgtacgcatcaatgtcagtgagaacttgaagaatgtgcctgaacgtataatttctgtccgtggaccagcggagaacgtagctagggcatttggactcatcacaagaacaattttggatgaacctgaagatgaacctgcttccatgatcagtcagcagtacaacttgaagattttggtgcctcaccctatgattggcttcatcattggaaaacagggcctgaagtttcgcgagattgaagaaaactcagcagccaaactaaaggcagcagagcaacctttgccgtattctacagatagaattttgtccataactggagtgggagatgctatccatatagccatctattacatttcccaggtaatgcttgagcacaaagattgtttgaagaagaacaaaatcatctactacaaccctgccaacttccaccactccaacgtctctaatagcatgatgaacatctcaatggtttccaacaataacaatatgaacaatatgatggttatgggtccaaatgcgatgtctcttccaatgaaagataacaatatggccaatccgtatggacagaagccacaaccatatggccagcaccaaaataaacctccacagcaacatcagcatcaacagcaacaacagccttacaatttccagatgatgttccaaccagctatacatccacaacatcactacggagccatggctccagcagcagctccaccacctccaattcagatgccatcacagactccatacactgacgagcacggtaacacaattatcggcgaagtcatcactaatcctccagttcaatcaggacctactcctgataagttgaaccaagacgttttcgtagccaacgccaacataggatccgtcattggaagaagaggtaataatatcaaacacatcagagaaaacagcggatgcacatatgtcaaaattgaaccagacaagggccaatccatcatgttgggaggcggcaaaggcttaaccaacatccgaaaattgacgttgacaggaaccctcagctctatccagactgccatcttcttgatcaaccagagaatcgcagccgacaaggaaagaaatgctcttcattgacttgtacacttttgataactctcatattcaatgtctgtggaccatctatagtcttctttctttctttgttctttttatcactttcattttctaatatatcttatctgatcatctgtatttctatgtatttctattgtattctacttctgtattctacatctactttcaatcacttttgtctctggccgtctctgtacgtcctctattcacttttgtccattctccgtctgaatttctacttctgtattctttcatatgtgcttctgagcatatttgcattctgatctgattctaaaccatctgattccatggcatcgtttctcattaaatcaactttgcatctgtacttatatttctgcatctcctctccaaatctgtatctcaccgtctactcttgcattatatccctgatagggatagtcttcgacaggagatacttattacaacacttgaattgttacattgattcgtctataatcatacaaatgtacaatttactgtctataaaaacctaaaaatgttttactcccaaactcgtcaataacatcgtaaccacgctcaacaacccttctccaagaacaagaccactgctgaaaatgatcatggcgattctgttgtttccagctgttttatttccaaagtttatccaccagtaagcaataacaccgccaacaaaccgtgcaagtgtgaagttcggcgtattgtagataccgatacctacggctataccactgggcaagtatacaagatacttgtggaaacgagaacttgaaggaatggtatttttgagcaatgcaataaacccaaagattgctccaaagatcatcgaaaattcaaatgccataggtggtaagccttgtccagttaccaaccgagaacagtcgatccagatcacggctgtcggtattctgaacaaatctccaggaatggtgtatactgcattgtagaccttgtacattatactgctgaggaaaaccgaatataatgtaccgatgatttgtgctatgaattgtgccttgggcgaggctcctataagatgacctgtcttcaagtcttgcatcaagtctccggcctgttgcgccccagcttccgcaacacctcctgctaccaagttgatcaagattttggatgggtggttggctggaatgaccactgcaaagatcaactgcgacaactttccaattccagaaactgggttcaagtctgtttctccaagagctctaactccaagaacagagaagaacaaggcaagaacaattgctacaacggcagcatagtacggaacaatggaaccaaacacgattctgatagaaataagacagagaatggatgaaaggatgattccagaaaacgttatcgtgttgctcaccaagtagtccttctgaatctcggctctggaaagaggactaatagaagacgtctcggctgttttagctcgttgaccagagtatgtgctgttagaggggtcctcattcgagtttctgtcgctgtcttcgttgagtaacgactgttgcaattctaaagtttgcagagttgcttctgtataatgtctttgggtgttcaaatctttcatgatcttgattccgcttctgatcgatttgaacgtcactattagaaaagaaacaagtgagtcgctgatcatcacactcaaacttatccatagaatccatccttggcctccatgaatccaatcgtcaatagctcctggggcccagttcttactcttggctaagggtgcaaggatgccccatcccaaaatcgcaccaaacaacatgtacgatacagttggtaaacccatgattataccctgcccaatatacgctggagaaggctggaaattccacttgtacttgttggaaagatttgtgccaaatatgggcaagtttttcaagacaggaacaaaatacgataccaatgtataagtggcagacaccagaaatgtaatcaataacgaatggatatttttagagtagactgaaggttcttgactattttgctttactggtgagtcttcttcttgttctgtttcgtcgttggcaagatagttttccatatcctgagacatggacgttttgtttaacaaggcattttcatgttttttgatggcttttgcttcctgttcgtcgtcgtagatttcggttccatgcattactgagatcaaagtggctgtagcacttcctgagggaaagggaagcttctccttgataatcacttgctttcggagtggaacagcaaaaaagactccaaagagacccaagccaagcgaccacaccatcaagtcaaacaacgaaaacgaaaatttgtcgcccaagccagactcttctgctgtgaggaacttttcgatagccggtacaatccctataagtccgtagcatagaggacctgtccctacagctacagctacactttggacatagacattctctacgtcagtaaaatcttcagaatatggtgacaatttgaagatcgtgaaacccaacaaggcagctggaagtgacatcatcagcacccagcctgtctggagtccaaactggaagttcagcacgagcactatggaccctataaccaagcctacaagagtagcacgtagagtgacctgggggagggctagtttctcgccataggtgtggctcactggctcaagcgttgtttgtgaagcatttcccggcgaatgtgacattgtgctatggtattgtatgctaaaaaatgggaatgtgtgaagatgaagttaaaaatttgagcttcgggtatgaagtaatggatgcgatgaactgtgagatgttatatgagatggagtgtgaaatatgggaaatatcagctagtctctggtatcatgaactcatggatgtgtctgtggtgagttgaaggcaaaaaaagtagcaaagaagtcggaaaatgacagaatataaagagtgtgaaaggtcaaaaagttgttgagaaatgatccacagctcggtgaaaaatacatcaatttcgctattagtaatcgcaagaaattttccgctatctaccagagataaaagtacgattacgcgcaccagattcagctaaaagaaaccgtctatcagttgaatgtgcaggcagtaaacggaattgtggagtcatagtagcagaagttaacagaattcgactggcgaagaagaataaatacagctataatttgtttataatagccataatttggtcattctacagtatcgtgatagtgtcgaaaagagagaatgtcacatgatgtcaatggttcaaaatagcagtgtctgtagtgcttagaatcttgtgagtccaactagtcttcagactttctggggccagttcatgtaaaaactgagatctagtgactcatttagccacgactttgtgcatttctacagttctttgttgccagtcagcagctccactccaatgtagtggaaggaagtactgtctcaattattctttgtctctcagtaattcgttgtctctcggtagtttctctcagtagttcgttgtcaacttcttgtagttgaccatcttctcggatactcttttatcagtctctttctccatagactctcttctcgtaacttcttgagtctctctatgcactcactctatcgactcattcggccctgtctacgtcctcttctttctactgtatactggctaaatacctacctagtcctcgccaaacaagatgtagttcaagatgtcactcaacgttatcaccgagaccaacttgccctcttcgtccacaacaaacaatctgtgcaatctggactttctgatggtatccatgatggtgctcaatctgtcgttcatggtacacgtgtgaacaccctcaaactcttctggtcttcttaacaatgcatcaccaacactcaagtccaagtcggtgtacattcctcccttcaccaatgccaaaatatcaacggcctcgtagacgttaatcaacttaccttgagcatcgacaataggaactgaagaaacagatttgtgggccaacaagtggatgacttcaattacaggagtgttcatggtacatgtggaaatgtccttaattgtgcccaagccttgcaagtctttgacgggtttcaacaacatctttgtttccttacagtttaaggccacgaactttaagattctatactgtgttaaaactgataccacaatctcacggtgtgtcttttcgtcttcgtcaatcaaaggaattcttctggcttttgactccaacatcttaacacaggcctcgtacaacgacttgaagggatggatcgataccgtttctatgggcgtcacaccaatagccttctctacttctcttaaaccatcgagggtcaactggtccactaattcaaacttctctggaaactggaagtagtactggatcacgttaataaagtcagacgacgtcaacaaacctgcaaaacgagagctttggttattccacaatggtgctgacacgatattattctgaagcaatatgtttaaagactttttgaccaaaagcgatgtgtccaatacgatcaaacgatatgaaactggcaacacatcatacgaagtcttactctggaggaacaacctgattgctcgaacaccgattttctggtcgtgctcgatttgttctggtgataagctcaagatgtactcgttaggtgttgcagagccaacaaagtctgacgacacttcagtcatatttgattagttggatagattcgttggaaaaaagattatgaaaagtgtaagtaaaagttgaagagaatatgaagaaagtacggtcttttttgcgtgtcaggctgctttaactatgctggaaatggaattgtgtaatctactgtccaataaattaagcgggtctgtatgagatgtagtggatagagattgaccggtgaagtgtctggtggtaattccatttggatgttgatagtatgaggatgtcgtgcgacattcgcgacatcggagcttgacctgaagttttgtgtaggcttaagtatggaaatactgcgaaaagctcctacagtgaatagcaatggagtattgaatcccactatttaatcttagaatcttcatctttaattatctgttacattcatattcataatctaagtatatatctctttgcattccttgtctgacattcttctgtcgcccatcatcttctttcacaccaagaatttttcatcttcaattccttcacatctttcttcatgattgacttccccaaacaaccaccgtcgccttccgccgacctcaaggatccagacataactgcccagatagaccctcgtatatatcttgaccaggaaacgaagctgtggatctttgaagacaaaaatgcagaatatgaatacaactttgagctgaaagaatggtccaagcgaactcaagcaactataacttccaaacgtgatagcgttgctgcacaattggataaagaagaagaagaaaacaaactcaacatcaaaagaatacgaaaagagaaaatgcagaagttgaaagacgaaatcactcgactcaagaacgaaaagagcgccgctactacttcgaagcccttggattcaaactctaatgaaaaacctgtgagtgctgtctatgtatcaaaattgcctttagacatcaccaaagacgagttggcacaatccttctccaagtatggaatcatctcggaagattacaacaccagccagcctcgtataaagatgtactatgataatgacaaatttaagggagaagcagtagtattttatcatgccgtagaaagtgtccgtttagccattgaaatgatggacaatacttatattcgaccttcctcaaacggtgaatctagaatatctgttcaaccagctcaatttgataataccagatccaagtcaacggaagaaaggcctgttttatcagctgaaaagaggaaattgcttctacaaaagaaagagtccttgaagaaaaggttgactcaatgggacgatgatgtcactctgaatgaaaaagaaaaagaagctaaaattgttcttgtcaaacagatgtttcgtgaagaggaacttaaactggatccaatgctagagttggacttgaaggaggacattcaggaggaatgcgacaaaattgggataggaaatgatattacaaaaataactgtatacgatataacaggtgttgtcaccatcaagttcaagaacccaattctgagtctgacttgtatatccaacttcaacggtcgtttcttcgacggactcaaattgcaggcttctttttatcgaggtgaaaagttggagaagtcaaatcctgacaaagaaaatccaggagatgatagtgaaagattagccagcttcaccaaagaaactgcgaaagtaaatttatagaatacctacaaagctctattgataaagcaaaactatcattactactgatatcgctagtacatgtaaatctttgtaacattatgaatcaatacatatctcttagatggccaatttcttcaagctctctaccaattggtacctggaggaggcaataatgggttcttcctgttcgagccaatatttgaccttggacaactgttgccgcaattccatattttttaccttcgtagatgcactttcatctgtgagtttctgattcctgatgtcttcaactaacgacctcacctgactttgaagaccgactactgttgaaatcaagctcttcctttcttctgagtccttattaatctcgatattgacagagttgatttccttgaaccaattcttttcggatactgaaataggtaatgatttgtttgctctccacttttgaatggactccattagtttggatttcaagttttcaattctgttgtcgagtgctttttgctttctcaaagtttcggcgatcctttcactattcttaacgagtccagaattgtcaatgttcttttctaggatcttgtttaaggactggatttgtgctttcatgacttcaacctctgatcccatacgaatattcaactgaatggcgaaagatgtacaccttgcaacttgctcaatggtagcactagaaagcttgttcaaagcctcaagaatgtccatttctgtcttgggcgtgccactaggcaataatttgagtgctgattctactgggagcaatgtagctgatctgataagttcctctatgggctctttacaagacaaagggccttgaacaaatccaacctcaactgccttgtcttcttgcttttctttagttaattttccttcttctgctaaagcaggtttcaactcaatcacctccaaattgtcttggctcccatttctgaacacaactaaaacatctccagtctgtgtgagttcatcagcaactacaatcgtccccaataccttttccgttctactggacgctgagatgtaagttttggaagcttcagcaaatgtctcttcatccaattgaagacctgttaaaatactgtccacccatgccctggggtctacgaagatgatattctgaggagaaataacagcaaatttggacagctcagcattaaacactctggcaaatactttttcggatatagtgggaagttcgtctctactcaacgtggacaagactgtggtttcgtttttccagaattcgttctcttttattcttctatcttgtgccaatttttcattacgagcctcctcggattcctcgggggattcagataaatctacaaagccaaatcctcgtctgggtttggcatatcctcgtggcttcacaacaggtttactaggaagattaggggtgtcgtctccgtcgttccagtgcattaataaaggtctgagctgtgcgtggtatcttattagcacatttttatccggagaagacgataaagatgctataatagaaagatcgttgttagatgatatatggaaaatgtcagaaacgggtgcagttccagaatccaacggaccttgcaaaactggctcgtagtcgacgggcaaactgttgtcgaaaactaccaactcatagagagaggtcgtgcctacgcctctaacttctttaaatgtgaacgtggaagcttgcttctgtaaatgggagtagaacccaaattgcttaacggcggctgtcatcaacttgctatcaagtgtatcggccatattgagcgacggaaaccgggcctcgatctccgaaattaacgctgaagtatcagcaagcgcatcgctgacagcagtggcagttgtggctatacgagcacttctgtgaagaaatggatatacagcatagatatgcgatttctcggtggaaacatacaatgtcaatgcccccgacaagttattcagcgacccaaacgaaattgaaagcgcgttatcgtttccaaattgtttgaacagcgttaaatccaccgaaataacgggaacatcaagcgaaacagaaatgtcgtacgctttgatttggctgcgatcgttcaaaactacaactactgagtcgtttgcagctaccgtctgccaaacgacctttctgatcttgccaccgatgtttctgagcttgtgagctttggtggaaaccgttgaaccgagacctgattgcaaattcgaaggaatcgacaaaatcaccaaatcctcttctcctattgaggctagcaatgttcccagattgttcatttcaagggcgacaatattgaatttatcgtatggattagacaaaatgtggaaattgggatttttgggatcaacattggaatatctgatacagtttctattggcaaaatagatttccctgttgtctttgcaaactagcttgttatatgctatggaagtgccatcatctccaacagagttgtccacaaacgtttgaaaaatgtattgctcagatacctgagtcacaaactccgactgcagcgacgtgatcatagcaatgtactgtgaaagttgttgaaaagagaatggagccaaataaagaataaaaatactttcaattgagtagggcgactttcggaatatttgatttcaagaggtgtggaacttcctgtactgcagacagtgacagagggaagaaagaaggcaaacagtttgtgaaagaactggacaatttatatgagtttagtttattcgtataaactagtaagattaagttcaagttgttaaatttatagaaatcactccttttatagaattgtaatattgagacaaatgaaaagatttattgagggagatttgattgttatgtaccttttgctagaatttgttcaaagaattacaaatacttcagtaatattttattaaagagatgaaaagattcaccaaagacaatccatgtcaatacaagcatctacaacatcgtaatatactttccaaacttcaatggactcacttctaccgtccaagcttgttcttataaggtgcctgttaaattcaagaaaatcacgtgaccacactacatcaccaactttttcaaatttctagaactaactatacatctatttgttggttattatttggaagctagaccaaataatgcctaaagtgtacatagcatcggtcaatgcgccgcaggcacatgctctggatatcctcgatgtggcgatcacgaacaaatacaccataacagtatccagcgacggatgcgccaattattgggataactaccagaaggagaatcacaatccctttgacttcgttcttaaaaaatttgtgcacaaaacgggaattcaccatgtggccgtatatgagaatgtgatgccggattcaactataaagttggtggtagtagcatttgtgtgttttgatggttctatcgtatttcattactataccaatgatgatgccagcactttgcaagttttggaaaaccacctgttcaagaaagattattgggccccagcattctataaggatcccgtatcgaagcaagactactttgtagttactcaggctacgggtccgacgtccgtgaactttttgaatatcacgattggtaaagataatgcagtagatatcaagtttgagaaagctggcgagttgaccactcataaatccgtatttcccaactctttggcagtgactcgttccgacgacttattagcggctgtaggatatgccaatggcgatgtatacgtgtacgacttgaagcttatgaggactctctatacttttcggtctactgaccttgtcgtcgaaaccaaaggaggaaactctgttgcaatgcctcgagtcttgaagttttctaacgattccaagtttttggctgtagctagagacaaccaggcgtctggatcgataacattgtacgatgtcaagttcggtgagtatattggaaacttgacgtcgcaaaacataaccatcaataatgttattggagggtttgctcatagtggctggattatggggttgagttttgacgagcactcgacacttttggctagttgtggctttgacaagtgtgtgcggatttggaacctcgagtcaagagaaagagaagccaccatcaacttgaccttgagtgatctggtagatacgccctttgacgagcagttcgacaagtgtgttgctagtggtgttgcttttatcaaaagtggaattagaggtggtcccggaaaagacaacaacgagagtttgtgtgttattagttttgaccgtggagttagatggtacagagaagcgggaggagtgtaaccacaaagtctataaaattgctatcttatagaacctgtagattatataatgaaactgagattcatgatgacttgttgagtagaagaagcgtaagggaagtaattgtgtctggttgattagaagaacaagatacgtagaaatggatgttttcgattgtagataatcctaacaaaaatagaattgataaataaaaatcttaccagcaaattctatttgaacgactcatagcactgaactggatacctgagaagcactattctcatgagaagcaaagctctttcattgtataaatctacggatacttcgtgcttttgagctcaccaaaaattaaagactgcgaaaaatcgcgaaatagataataaataataaataaataaaatctacagagtggaatctaggatacaacaaatatcaacattcgtacttttcagtattggagtacaaaacacattaacgttatggacgaagagaacagtacatccgatacagttaatctcgatgagctcgcggccaatatcaagacatccatagctcaattggtagatgtctctttttccaatgatcctctaccagtattgttagatctccaggaccctgtagcaaaatgtggactagacgagtctgatctcaacaatctcttcgatttgatctttgacttgaagaaggctgccgtcctcaacaatactgataagaagtttgttattaaaagtctactacttcctcgtcctggaagttacccagctatggatatagtctacagaatcctaagcaatattggaactccgcagagtatctacaaagatgggtctaccgctaaactacgattactccctacagcaattcaacttcaactacttgattggttggtttgttcacttcatttgtttggccctcaggtatacacttcgttgcgtagaatgcttcctatcttattcaaattgataacatatgagtacctgcgtccctacatagcaaacatcatatttcttactatactgagcagttcaacttcagttgagacatacctaaacagacgaaatatcgggcgtatcaattcgtggaaaccgtggcatgtccaattggtagttgaccttttcggaagatttccgttggatgagtacctcaaaagtttactaattctattcaagacattggatccaactattgatttcaacaagtttggaaaagacattgcttatgatatgaataagttagtactaacgtcgtcacgaccatttgtttatcccaactttgattacctcagtcgattgaaagaattgaaatacatcaatgatatttccagccataacagcctggcaacaatccttcaagataatctagacaaataccgaaatttcagccgtgctatgaacagaaacaagagacaaaaatttaacaacaatactgttgcaatagacatcgatacccttgattttcataactctagtaatgatactgccataactgaagtgcactcatttgaagcattggtgcaatctttagataaaatcaaacacataaacattcgactgatattcactagcgactgggaccaaggttatcttgcaatggcaaagaggtactactgtatcctatccaatttgacagtaaatgactccagtgaagctttaaagaaattagactttttcatccgtctcagtatacttgatgacaatataaacatcaaagaactttcgtcattttgcgatagattatgtcagttcttgctacttggggcggataccatcattttaccactggtaaaagattacgttatgttcaactatagtgcccagcccataggttcagatgaaactaatgtcgagtactataatctcaaggaaaggcttaaacttttgaaatttttgccaatggttgctgaacaggaatttcaaaactcagtacttaatcctattcttgcattattgtcaagagctactagacacagattactcaaattgagaaaggaatgtactctgcaattcattacagagttgatgttcatattttccaagtggtacgaccaagtcaaggatttgaacacttacaaagaacagaagttcaattattttgccattattaaccagtcgcttcctaagttatatgcatttcttctggacatctacaaaacagaaagtgatttttcaaatttcttgttgatacaagtgctaagatttgtgaggagcattgaagaagatgatgtgaacgagctctttaatgacagtagtatcatgcttcctcaaatactagtacatactttattgttcaagagtaaccccttcttgttttccgagttgtgtggtttcatagcttggaccaagaggtatagtcacagggatttgaacaatagatccatccagaattcttacattatggacacgctcaatttcatatggagagacaaggcatttcatcttgaaaaatcagcttcttctcctagcaaagcttttcaattgaattcagatttcgtcaccgcaatctccagttcgcatatgttcaattctgtaagtactggctcattaagcaaagtaggcaacctctttgtgaacccagcctggtcatatattgtggctcagctcgtctggggctttgaagatggaaatgacagcattacaacgagacaccagggtcccattagtaaagaaagcatcgatcaactcaatggagactccgatgtgagatggttatcggtgaactacgacgagttaaagctaaagattcttcaagaattagacgctcttggatttacagggttctgtgatttgcttttcggttcgttgaaaccacttctgggaaagagaaagcacagtatcgaaacaatatactgataagtattacatcacagaagtttgaattctactaagaaacagaaaaaagtctgcgtgtgacagtataataataaatccacaagtattagaaacattagcctactgcatttactgacttaacaaagactttgtgtctttctacgtactcaataaagtattcccattaagccatatttaggagaaatgtacaagagcctggcggcggtgctggagagcataattaagataatattcaacttcaatgtatgatatatgggatacccaacagcaaggattctgtttctttgtaatctcaattgcatatctgtaggtgttggaaatagcaggtgcctcaactagccagaaagctaccgaaacctttttgaaagttcactctatctcttccattctagtagttcaatatgaaattcatacagatatctagctctacatattttttaacaggttgcgaatttcccgttcgggcaatggtgcggaatatcccttgggcaatagttaagagtaagagagaaaccacaatccctttgaaagataaaaacgaggaacatgttatcgtatcttggatatcattatgattaccctaactgggtgcaattcgataaatttgagacagccacatagtttcgaacgttttcactgaatgtttgtgactccgagatctttgataagagattgtcgcaaaatgtgcaagcggacacgagccaccgttgtacagcggatggagctgttcgtgcggaagttgccgcatagataacgaaatgaatatcgagccacgacgtttttgttgatagtaaaggggattataaaaagccaacaatgaactttagacattctgattactctgccaatttccaaataattctattcaaaccatttcacaactaccatgcaatcaaccaaagctcttccatatccagatgaagtcaatattgacaaactacaaggtaccaagtacgatttcgccagagatttgattggctatggtgaaaagtcactagatgctaaatggcccagtggcaagaaggttgctatttcctttgtgttgaattacgaagaaggtggtgaaaggtcgctatccttgggagatgacactcaagaattcaccttgactactccatcaaaaggtgttcctattccatttagactgtttgatcttgaatccgaatatgactatggttccagagccggtgtgtggagaatcttcagattgttcaagaagtacaattacccgctcactggatacattgttggtaaggctgctgaaagaaatccagaggttatgaaagcatttctcagggatggccacgaaatcgcttctcatgcctaccgctggatcccttacgctggattggaaccggaagtggagaaaggatatattatcaagcaattgcaagaactcaagaacatcactggtgaataccccaagggctggtactacgggagactttccactcatgccttgggtttggttactgaagtatacagagagctcggtattcctcttgaatacatcagtgactactacggtgacgatgttccaagatggatcgaagttcctgcggaaaaagatttaccaaaagaagaaaagaagggtttgttattggttccttactcttatgactgtaatgatttcagattcttgaaccctaatggtttcagatccgattcagctttcttggaacacttgatcaatgcgttcacgaccttgtatgaagaagctgacgaatgtggagcaaaaatgatgacagttggtcttcattgccgtattattggtaagccaggctacttccaatcgttaaaaaagtttattgaacacattagtcaatttgaagacgtgtgggtttgtcgtagaattgacattgccaatcatttcaaggaaaccttcccatattctccttcagaataagtgtataaatacagaaaaaattgataattaatgttattagaaattgtatgtattctatgaagtctgatcatcgatgtgtggtcatttgtgtaatcatatcttccttaatctggtcccagaaatcatcatcgaaagtgaaattaagagaagtattgtcgagagaatgctgcagaatattcgaagtgttcgatttatatccttgctcaatagaactggctccatttcctgatttacttcctccattattgttaccattctcgactgtatccgcaaggttatcaaacaactcagaattggatttggcttctggtagtctctcggcaaaaacaagaagcaaactcgaacaagctcgtatatcctgctgaatgttagacatggccgagtctccttgattccagagatagtacaataatgtcactcctgctaggaaaatggtgttaagagcatacagactgaagcctaagatcgagcctttgaaaagaactttgtacgctcgacaaataccgccagctgctaaacgacattctgttaatgcttggtttcttggaagccctgggaaagaatcagatgtaagcttgggcaacaataacatcaatcgagctctatgatacaagagtaagaagtactcgtagcattcttctcctttcaatacttcttctactttggctcttggagggagattcagcacccatgtttctagagaattaagtaaaccttcaaatattatggaatgagcaccgtctcttcgtcctgagtaaaagtaattaaaaatttccccttcgattctcctcatcttgctggtttcaacaagtgtacctattaacagaattggttgcttcatatctgggtttctttcctgttctttttgcaacttgcacaaattgtctttgaaatggagtgtcagagggtcagagtcttcgatactcaagggcaacggaatatctatggcatagtctggaattgagaacggttttcccatggataaagaaagaagtctatcaaagttatatgctgaccaaaacaaccttttacagaactcatacgggactgcattatcaatggatattggttgccttctatgtaagcccatttgcacaattttccttatggccattccagagaggtcccatgctttgatattgaatgtcacatcatgagttcttccaacatagagagccattaagagacatgcttgaatctgctgaataggacgtagttttgcacgagaaagatatgagatacattgagaaaagtagactgaaggaggaggaaagactttgatctcccggagttcctggcatttacatccattggctacaactgcatagtagacaaatgattcccagtcacttctatcgtatggatcctttcctaggatagacgtatcaaactcataccgatctacaaaataatatcgacttcgggaaagtgaaaaatagctttcaatgaaacctttttctagaataaccagattttctggcaatttttcaggaatttgtagaaacgagaaatcaactttcttgtggaatgtttcattctctagctgtttcccaagaatctttttctttaacgcttttaccatagagataaaggcacctgggccgatgtattctacgggatctaccggctgtgttatcaaacttaggagtgccgaattcaatatcgtgggggcctgactattgacctgtttctctaattggagatatttctgctcagcgacctctaatttgtgtactgtctgttcaagcttgagctggagagtctctatgtaacgctcatactccaacaacgacttctgggaaacggtgccttcatacacacattccttattagcattggaacagtttctacacacggtatgaccgtcgcactttctctttcgtaccttacaacggttgcaagctatgaaagttcttctccttttcaacacaggattgtcacgttcactgtaggaagttggatattccatcgtgggcttcgatccagctccagaagaagagacgttcaacgaaatgagattgcatggttcaaagttgtttcaccaaaatactgtacattcaaaatacatgaatcacacaggaattgttcttatcagtaattctctggatagacaagttgagacgaccacgacgcatgctagaagacacaaagatgcacgtaattacgacggctgattttaaaatatcaacgtattctcttttcaatcaagaatatagataacacaaatagtcagaaggaggacagctacgatccagaattagaagagtgtgttctattgtacttcaaagagttactcagcggctaattacataaaatatgtactcggaataacaaattgcaatttcgaaagtgacattccgtatttctagggtgcaggtgcagaaaatctggcgtcaaaaatagtaaaccttatctagcaacggctaaagggtagtctatatagccaactggactcaaatgcttgtagaacgttgccctgtcatacttactaagagatgccaggtattgaagacggtgtactagatcaggattactaataaagtagcgaccaaaagctaatccatcgatgcctgtttccagtaggattcctgcgaaattattgcagttccaacccccagccgaaaaaacgggtgttgtgggcaaatgtttctttaatggtggaatgctacttttgagaacctctttggacaacagaactttcttgatgtcatctttttctagccctccattactttcagaacgagcctcaatgatatgaacatatgcaagcgatctcttttctaactgttcgcacaaatagccaaagtggaacaatggatcactgtcgttggcaccctggaagttgtcccaaggagaaatacgaacacctactttggaactccccaattgagaacaaattgcatctataacttgaagtacaaacctgcatctgttctcgattgttccgccgtacatatcagttcttgaattgatattgtcctcgaggaattgatcaagtaaataaccattggcgctatggagttcaatgccatcaaatccggcttccatggcgttgctagaagccttgcagaaatctgatatcacattcttcatgtcggcttccgtcatttcgcgtggcaattcgaattccaacccatcttcttcgtagttgagtggagcacccaactgcttgattgcagaagaagaaattggctgttgattatcattaaatttagataatgctgatcttccacaatggttcaactgcacgaagatatatccacccttgtcgtggactgcattagtaactttccgccagctttcgattgactcagcagtgtcaattctgggactgtcaggatgtaaaccagctgtagatgagatggtagtgccctcagttatgagtaaacctcctggagtggccctttgtgaataatatgtttccatcaaggagcctggcaaataattttcagcgcggtatctagttaagggagccattatcacacgatgagccaattggagatcgcctatcttaagaggagtaaaaagtttatcagttgacatgtcagatatttcaaattatggaagtggaagataaccgcaaacatccagtatgcttttccttgatacaaatctatggttatatatacttgacttggggatatgcagatgaatcgagagatattttttagggcaacgaaaatattcctattccgatcttatcttgcagatgcggagggtttccgcaggcggaatcgttccgccgtttgaaactaagatcggacgttgaatttattcaaagccaaattgtttatctatcttctaataccaaaatgataaagaacagaatttacgattgattgctatcctgtgatgagggctatgttgtatatataggttgcaatagttggatacaaaaccaaatagttgcaaattaattcttcacatattcaccgccgccaacataatcataaccacaatggacgctttaaagaaactagacaagtggatagctgtcgaggatacctccacagaaagaggtgaagaccaaattagaagtaatgaggatttggatcctactccctctgaccgaagaacctggaaaatgtacaactacattttgatctgggcacaatctgcattcaacgttaatgaatggaatactggtgctagtttgatgaaagcttcgggtcttccatatggtcagaccattggaagtgccattttctccatttttgttgccgttatctttactattgccaatgccagagctggctctacatatcacattggctaccctaccctcgctagagcaacattcggagtttatggtgcttactttttcgtagctgctagaggttttgtggccattatttggttcagtgttcaatcatactatggctccatgtgtttggatgttgctttgagatgtatgtttggacacaaatggcttgatttgaaaaaccacttgcctgctagtgctgatgtgcaatccaggattttacttgctttcttcttgttttggttgattcaattccctttgatgtttgtacatccaagacagatcagacattttttcactgtaaaatcttttgttttgccttgtgcaaccattggtttgctaatattctgtgtcaagaagggtcatggtcccggtaattacgacttgggcttacctattagcacttcctcttctgctattggttggggatggatgtccgtcatgaactctattttcggtacaatttcccccatgataatcaaccagcctgatattgccagatatgcaaaaaaaccaagtgacaccattttgcctcaagctattggatttgtacttgctaaaatcatgatcatggttgttggcatggttgctacagcttctatctacaggtcttatggagaggtttactggaacatgtgggacttgatgaacgctatccttgatcattcttggaacgccggggccagaacaggtgtcttctttgtggcagtttcttttggaattggtactgctggaactaatatctttggtaactctatcccatttgcttgcgatatcaccggtttattaccaaagtacttcactattttaagaggacagatagtagttgccattctagcatgggccatcgttccatggaagttcttaactgatgctgcaaagttcttaactttcttgggaagttactctatctttgttggacccatccttggttgtatgttggctgattactactttgttaagagaggtaacatccatgtaccttctttgtttacaaagaaaagttcaggggtataccattatgtctacggatggaacctttgggcttgttttgcttgggctggagctgccagtatttgtattcctggtttgtacagagcttattatccagaatctcttagcattagtgctactagaatgtaccaaatgggatacattctaacgactattagtagtatggtcttctactactgcttgagtttgatcttcaaaccacaaatttatccagaagctcacagggatactccaaagacatgggaatacatgagaaccaccgatggattctttgaagatgactctccaataggcaaggttggctactttggttctgtcgatgttttcacaggtgagaaagttgacacatctgaaggttctagtgtcaaaactaagagcgagaagatattggaaactgtctctattgtttaattctttagtgtttaatttttatttattctaatatgttttagtattgcttaataagtaaaatactgctgtaattaaatttatgagttgatagcaacgaagagtaaatatttgaacacttggtttgaataaataatcaggttgaagtacaatcaagcggaatagaggacttgatgagtccaaacatgaaggtattattatagtaaactacaaatacattctaatatgtaaaagttttaagataacaatgatgtctatattcgttaattaagctatattaaatgcaatttttcatttcctttcttccacaacaactatggtactgtcggacttgctgtctttcacgatggtttcttcgtcttcatcatcccttacttctgtcttgctggtatccggtatcaccacatcccttgttaaaatagacacaaggaatgttagaccagagaatgctatcaaaatgaataatactgttttgtaactttttaagtaggcttcaaagacatgaattctaacatcaccattcaagtcttgcatcacagcaggattagaaacaacagcttctgtaaccagcaagggaactttgcttcttagttggcttctaagagtagcattgaaggcaattccactgataacgagaccaacggagcctccaaagcacctgaagaagttccgtaaccctgtaacaacagcacggtctgctgaatctgaattagccaaaagggcaagtaatgttggttgaaaagtaaagccaatgccacaaccttggataatgttggttcccacaatgtagccaattgaggtgtttgaatcgtacatcaatttcaacccacttccaagagcccataatgcaccaccagcccataaacattgaacgtacctgccagttctactattgatttgtcctaccacaactccaaaaatactacttgtgcaagtcgcaggtaactggatgacaccagctatcataggttgccagcctctgtagttttgcaagtacaagggcaaataatatatatccacaaaatatgccaatcccatcgagaaacacagcaaaaataataagaatctttgtaagtctgtgaagagacgcaaagggatcaaggggatttcagcatagtattgttcaacgccaatgaaacagaaaaaggcgatggagctgattattatgagcgagataaatgttgctgacttccagggccacgactcatttccaccagaaattgccacaagaaacaacacagagaagatcatgctcgtaatgaaaccaaaccaatcgatcaacttgattttctttttgaaagagccttcgactggtttcaagggcacaaataatatcaacaagagaccacaaaccaagcaaatgggacaacttaaccaaaaagcccacctccaggaagcgtgttctgacaacaatcctccaatgaatggtccaatgccattaccagcagaggtggctgcagctactattccaaaatattttcctctttgtcgaggggaaagcaaatcagaaaatgtgatcatcaccaagcaatttacacctcctccacctatacccgacaagcctctgaagatgaaaagcatggttgggtttttggcgaatccacagcctaagtcacctaccatgagacaaaccaaactgaagacaaatatttgttttcttccaaagatgtccgaaaatcgaccataaagcaattggaaatttgtgttagctatcaagtacgaagtcgatgtccaactattaatgagaaacgcatggtgaagatccttcgaaatggaagggatagccgtggagacagcagtctggtcaaagaaagacacgaacaaagaagctgtcaaacaagataatgtcaataagagcttctttctatccaaagtctgcgactggtctgttagtccagctatggtcattttgcaatcaattacagatggaggacatacgaacaaaatttgcagaatgttaaagagatagtaaaatgtatatgtacttcgctaaccatttcagagtattgttgaacttctgatcaccaattccaccctctggagccgagccaatatcaatttatctacatagccagttttgggtctatcggaaatgatcattacatctggcagtgggtaaatgcggcaggtcgaaacttgaatccagttttgtatgcggaatcattccgcttccactgcagagcggaattcccgctgcagacagagataagccagagatatttctgtaaggtgtgcatggtcctgctaacgatcttgcattttcctttatttaatcatgacatttcctgccaaacgcttcttctacctgtactgaaaataagatcaagaaatcatcttagacttttcaaatatttttgcatacaatgtcagtcgtttcacttaaaatttcgaagtaagtagaagaaaatttgagtatattaaagtcgtttatcgattgaaatatacgggctctgaccctatcccatttttaatgaatgcaaaaacttactaacaatccagtgacaactctattacgcgtgaggacttgcgaaaccaagttgaaaaattgaaggtgaaattgaatgatgaagaagaggatgactactataccttgcttgcagccatggattcttccatcaaaaaggtgttggatatggatgatttttatctacccacagactatgagcgttttcccagaaaaaatattcatagaccagtaggtgtagataacgaagctaatgcttgggcctatagggtcgaaatagaagatactaagcccgaaatgtcgaaaagcagaccacttgctggtcgtacaatcacctttaaagattgcgtagaagttggtaaggttccgcaaattggaggtaccgattcatggaagccatggacacctgaagctgatgctacagttgtcacccgagccttagaggctggtgcaaagcttgttggattggctacctgtgaaaaccagtgttcttctacctcttctagtacttcttctactggtgatgttcccaacccatacggtaagtcccattcagctggtggtagcagttctgggtgtggttatttggtgggtactggcgaagttgaccttgcagtgggtgctgatcaaggtggttctatcagagtgccaagttgtcaatgtggtatagttggcttgaaaccaactttcggtcttattccttactctggcattggaagtaacgagtttaacaatgatcacgctggtccaatgacaaaagatgtactcgacaatgctcttcttcttggtgttcttgccggcgttgatggctttgatgaccgacaaatgggtgctcctctctacaaagatgttccagattacacgaagttagtcaaggaaagctccgtcaaaggtatgaaaatcggcatcttgaaggagtcattggaagttccagccatgactgaagcaatgaaggaaaaatttctacatcaggcaaagttgtgggaagctttgggagctgaagtggttgaagtatctatcccttaccatcacatcgctcctgaaatatggatgactggtcaaagagttgctggtgcagtcagaaagttaggtatgcaatgtggtagacgtgtcgtgcaatctagtaaagctattgaccactgctatccttggactcaagaatctttcgaaaaggcaccagtcaatgtcaagaacgggctcatcaacggtttgtatctcatggaaaagcacccaggaatctacgtgaaaactattaacctcagtttcaaagctagagctgaatatgataaagctcttgaaacggttgatgtgttgatcacaccaactgttccctttgctgctccacgccatggtgacagaaaagctagtccaataaaaaggattaaaaatactattggtctaaacgctaacacgggtatctttaacattactggacatccagctttgactttccctatgggattcttggcttctcaagaggatccagacatgaaattccctgttggtatacaaataatcggtaagcattttgacgagcaatcagtatatgctgctgcatatgcatgggaacaagcatacaactggaaggactattaagtatctcttagctttgcgttgataaaccaaatatctgcatttaaacatttagatatgtaggcgagccttcttatatactttgcttagaaatagttttgcaaatatatacaaaatgatgccaatacccacattgattaatgtgattgttgtcatttactagatgcaagttattcaaagacccaacagactactggaagaagtgagaaacttgcataagatcgtcagagacattaccgaaactagaagagcatgtcgaccactcaaggttcagtatagtagaagagtaattcaaaaagtttaaagagtattgtaacagtattaatacttacttagtgtacttgaaaaggattgaataacagacttataaaagtcttgtattgtctgtttcaatcaattcaattattaaataatcttttgagctctttctaatggcctaacaacgttacttcctttactgcaaatgaaaccgaacttttcttagataattgagtaatactaaataattatttcaactttcaatttatttgagacaatgatcttgttaagtggatctttaaatatcgtgttactctgaatcgaagttcatatggttgcaaaatgaacatttattttatggtgcaattcatagaagaaaatgcgacacaaatagaatcatctaactgcatctaaaaatacgatccaaaaaattctcgatttttcacccagtctgtttcttgatagaaacaacgagttcaacacaatgctacgcctggtcggctatggctgttcatgcaaagctcataggatatcacatgttagtagcataaacttcgattttgttgtatcgcaattacgtctaaactcatcaagcagcacaaatctgaactcaccatcaagttcaaattcaacctcactgaaagttgattttccttctttagatgaaaaatggtctgccaaatggagaaaacagtctcctacgggtgcccttcatcctactaagcatttgacagacactctggcagagaaattctacgctttgtctatgtttccatatccatctggtattcttcatttgggccatacaagagtgtacactattagtgatgtaatagctagattcaagaggttgaaaggttataatgtgatacatccaatgggatgggatgcgtttggattacccgcagaaaatgctgctgtggaaagaggcgtgaatcctgctgactggacagagagaaatatcgacaaaatgaaggaacagatagacttcatgctagccgatttcgactgggacagagaggtcactacatgttcgccagattactacaagtggacacagaagatattcttgttacttttcgaaaacggtctagcctatagaaaagaagcccagatcaactgggaccccgtagaccagacagtgttagccaatgaacaagtagattcagaaggtaaatcttggagaagtggagcactagtcgagaaaagaaacttggaacagtggtttataggtataaccaagtatgcttctgaacttaatcgagacttggattatttgaagggatggccacaaaaggtgaaggctatgcaacggcactggattggagagtcacatggtgctgaaatcatctttcccaccaataactcatctcatcaagaattatctgtttttacctctaggccagatacgttgttcagtgtacagtttttggcaatttccataaatcatcctttagccaagaaagctgcagaatcagatactgctctcgctgcctttataaaagagtcatcttcagcttcacctgattctaaggatggatacttgcttcgaacaaaggcgtctattcctattaatccattcaacgacaagcaagaagtttttgatgtccctatctatattgcgccctatgttttggatacatatggtcatggtgctgttatgggttgtccagcgcatgacgaaagagacttcgacttttggaaacttcatagtcctgacagtcagattgtgcaagttgtaggacttcaagatgtagaagctgctaagacaagaggcttggatctgccatttactgataaagcaggtattctctacgattcatctgttttagaaggtggtttaaaagatttgggagactaccatggaaaaacaacaaaacaggcagctcatgatattgtcaagtctttggaaaatcatggttgtggatctaaatcaactcagtttagaatcagagattggttgattagtagacaaagatactggggagcacctattccgatagtccactgtgatagttgcgggcctgtagcggttccggatgaacagcttcctgtattattaccaaaagttagtggctctagttttgggaaaggtaatcctttagacaagcttgaaagctttgttgaaacatcttgtccctcgtgtggtgctcaagctcgtagagaaactgataccatggatacattcatggactcatcttggtatttcttccgttatttggattctcaaaacgagaagatgccttttggtcatgatgttactaccaaaaacatgcctgtagatatgtacattggaggcgtagaacatgctattttgcatttactatattccagattcatctccaaatttcttggagatgttggtttgtggaacggcaaggaagtgcataacgagcctattaagagattggttacgcagggcatggtccaggggagaacattcacagatcccgacacaggaagattcttgaagccagaggaggtgagtactctatctagagaacctactgttattgctactggcaaggtacctaaggtttcatatgaaaagatgtcaaaatctaaatacaatggtgtagacccagaagaatgcattaagcagtatggtgctgattcaatcagagcccacatgcttttccaagccccagtctcagatgaactcaactggaatgaagaacaaatccagggcgttcagcgttggttaagaaaagtcatttctctagaagaaacgatctctaggttagcacttgaaagaaagacttatagtggagtcgatactttcaagcttgagaactttgaactttgtggtgttcatcatgacgtgttagaggttagtcaaaatgaattcaacttattgagtgatgttcaacgttatattcagcgtattgcaaattccattgaagttgaattatccttcaacaccgtgatttcagacttgatgaaattaaccaatgcaatcattgctgcatctaagccaggagaagatgtaaattatgagatactcctagattcttataggaaattattgattattttgagtcctatcacaccctgtactgccgaagagtgctgggaaaggttgaattccaatttagaattagagtgcaaatctatctttcacgaaaggtaccctacccaccaaaaaattgaatctccatttacaaaatataatgtctttgttaacggcagagctaggcattctttcgaggccttgaagctgttggcggagaagagtgaagctgaaattttatcgcatattcttaaatatgatgatgtttcgaaatttgttgcagtggaaaggatccaaaaagtaattacgaaaccaggtatgattagtattgtcatgacaaaaatctagaaatacttgtatatatttataaataacgacttgtacatagtcttcaaaattaacgtctattatggttatatatgcaaggtctatattgtacactatttacagtagtttgatgtctctatgtataagttaattcccttagtatcccctttgcatcacgtacctcttgtaatcctttcttctgattttaccttcataagtcaattgtgcccttcttgcgatactgcgcacagtctgggccacattggtatttccttgtctaatagcagctgacttcaagacatcaagctctttccaggtccatctaaattgatattccgtactcttcaacactgccaaagcatcttcaagtaaattaagttctgtcaaggttcgaaccatttgagtagcaaattggaaatcaagcttatctttttcggttcttggtaatttcttaaaggtttcagtttttctaaattttcctctttcctgccagattctattggcaaagttgtagttattgaattttccagctgccttcaacgcaaccacatatgttaatgagactctaggagttcttttgctctgaatggacttcaaaataggtgattttactatggaagtttcgtcgtatttctcatgagctgatgatttctgtgtcaaaaagtcagtagtttctacaactacgtctggttcttctataacaactcctgacaagacattgttaattttttcatcaaggaatgttgacccctccatcctgtcgatgaaatcactcaatgttcctctttcactggcgatgtttaagtatgaagtcgtgctttcactattgataagctccgagttattcaaacaagcatgtgcccaaattgcactggattccgccataatttgctctttagttgtgagctcgttaaagggaagaaaagggaactgattagtggggtcagaaattcctgatctatcaattacgttaaatctaaattttcttcctttttcatctgcattaatcaaaaatggttcccctaaatcatcactcaaacgggctttagaatacgccaataataagaaattgaacgacctcaatgaaacagtattatcttttaaaagtcttgaatacaatgccctggttaaagcaagatcaccgtccctagacgacaaatagagcatatactcataagtaggcaatgtcggggtccagttgtttctattaatttcaaatatgaaatcccaacttttgaatttaaaggcctctcttgaagcacaacctcgagctaaagccaccatgatttgttgattaggttcgattttttcggttatcatttctcggtatatatctatcgctttttcgatatcgtcattgttcacatatgaaacaatgatatcttgatatgctcgtgttccaggtttatatacttctttttgaaatctcattgtatcgaatatttctactgcttgtttgtgatctctagccttgtagacacaagtggctagtatatttgtgagagccatacctgatatctcgattttgtgtagtttcatctctgataagagatcttgaattctatttatatttccgttttttccatatgcttgcaccataacttcgcaggtcctcttaggcaactttcctttcttcaattttctgattctcttgcagtagttttccaagatttgaattacttggttgggcacagctgatcccagtgccaaactggctatgtacaagttcaatattttggcagtctttggtatctttgcctccttcaaaagctggtcgactttaggaataaccttttgcaactccgaagctggaatctttgtaagaaagtctactactgttgtgtagggtaaatctttgaaacctctgtcagccttgagttggtcaagtacaagggtccagttttgattagtttccgaaaccaaatatctgagagccaagcccaatctctttgctatttcttctggaataggagttgcaggaacaataaacgcattctgttccataacgaattcggattcttctttctctatatgagtagttacagtttcaggttctggaatattagttcgaactgttgctacatgttgagacttagtgacttttactacatcttcaacacttttgagttttttgatttcatctgagggaacaggaattttggctatcttggatagttcctgtttctgctttactaattgagacactttcttagtgagagcacgtagatcttcgattcttttgcgtgtcttaagctcatcatatttgattttacgttgaaaatcgtcgtccaaagtctttctagctctttcggttgaggaatcgttatgatttggaagatttgatatgggcgaaagagaatgagaaggtgattttctatcgtgtgagcttatgaaaatggttcgtatgggcccaaaactaccactagaagtacggacagagttaccaacttgcagaaatcgtactgtacgggcatatcggagcatttcagatcttctatggcaaaagtgaaggatagtggaatagcaaaatattgaagagttgcagtcaaaaaaaaataactatggaaaggaagtgaaaagttcagaagcgatgtcgcgcgacataattacagagaagagatgtatggggaacttatggacatgttcaacgaatatgaacaaaaagtgacgaagacttaaatctgcaaatattccttttggactacattagaggaattgctggaaagaactataaccagtagtacatcgtccacaaatatagcaccatatatataaatccagcttcccgggtagtttatgtcgcagcattgaacgacatttttactccatattcgcaatactcatttatcggtctggcatctgctacactactataattaaacatgtttcaacacttcattattggcttgtacctccactttttttctttttgtaatatctattcatagccaatgtcgttaggttcgggagctggatccggaacaaggtcccggtcggctactttaactggaagatcgggccgagggaatatcacagcagactccacgatgatttctgcgaccagcgtaggcgctggggctccatcaaatatcgctggggctcccggaggaattctgggaagctttccacatgacatacctccggatttggtgctattactacagaaactcgaagaggatttcacagtaaataagacaatcgaccaatggacatatatcaaccgtcgtgaagagatcatgcaatcggttacaaaacttcaccaacaacaacaggagttgcaggaacagcaaatagaccctgatctgctatcaaagccattgtttcctcgaaaactggcagaattcttgaaggaacataaatttctgctggagaaactagtagacgttttggccggtagggccaatacatatactgcagagcaggcttttttagtgcttgactcaaagggaaaggaagtcaattctatctcctgggaaaaactctacttgaaatctgtgaaaatagcttctgaaatccggcacaagtctacattgaaaaatggagacactgtcgtgttgctttataaggatggagaagtagtagaattcgttgtagcttttctcggttgtatcatgtcaggtgtaacagctattcccattcatcaggacatatctattcatgaagttttggacattatcaacttaactggcaccaaacttgtgctctattcagaagtagtagctaaagaacttgatcgtctcaatgctcaaagtcagagaataaactggccccctaaacttttacgatggaggacgactgaatttgggtccgcaaagaagtctgaactttcccactggctttcgcgagagaaccagaagaaaatcgacttgtccaagacgcagctagcatacgtagaattctccagatctccggtaggagaattgcgaggaattgcgctcagttacagaactatattgcatcagatgaactgccttaatgtgtcattactgagtttgcctgattctggaggcggtcttcagcgaagttataaagaatacaagagaaacaagaaagtagttttagctactcttgatatccgattttccatcggattaattcttggagtcttatttacaatctactctggtaatgttctcatatgggcacctcagagagtgatggaaattcagggtttatatgccaacattattaccaagtgtcgtgcttcgttgttgctagctgactatattggtttgaaaagagttacctatgattaccagcaatctcccaacgccacgaggtatttttcaaaaacacagagagttgatttttccagtgtaaagtgggtcttggtcaatgcattaaccattgatggagaattcatggaaatcttggctctgagatacttgaggcctttgggatgtcagcatccgcagaatgccattatacctatgttgactttaagtgaatatggtggaatggtgatatcattaagagactggattggaggaagagataaaatgggcttggctaatacttcagaggaagatgacgcaaacttcaacgacttatctgctgttctaattgacaaagaagcgttatccagaaatcttgtcactattctagatacaaatcctctagcttcagacgaagttccacacaacgcattgcgtgttgatgcctttggataccctttgccagacgctacactagcagtagtgaacccagaactgtctatcttagtacgtaaaggagaactaggagaaatatggatagatagtccttgtttatcaggagggttttatggattgaggaacgagtcgaaactgattttccacgccaaatgtcgtgatgctaacggtatgcttgagatggatttcttgagaacaggtttacttggattcgctcacaacggtaaggtgtttgttcttgggttgtatgaagatagaattaggcaaagagtcagttggattgaccaaaaattgtatcagaagttgaacagagacttggtcattgggaacggttcgagataccattattcttctcatttattggctacgttggccagtgaagtgagacaagtctatgactgtacgatttttgatgttttcattggcaatgaatacttacctgtagctatcgtggaagctgaagttgtacgtaagctagtggatgactcaggtaatattgaaccaaatgccaatagtggttcgtctagtacaaacaagccaggagaaggcgaagttcaattcaatgcccttccacataacgaacctgttttgaacacgattgcccagaactgtttcgatacattgtacaagagacactacttgaggttgtattgtgttgttgtggtggatatcgatacgttaccgaagatcatgaggagtggaggcagagaaattgccaacatgctttgtaagaagaggttcttagaaggaagtttgaaagctgaattcgtgaaattctttgtacgcaaatcaataagtatggttcctcatggtgaagacgtcattggtggcatttggtcgccatatgtttctgagttgagaaatgtagcattacaaaagtttccaaaccaattttcgactattgactaccgtgagaaatctctcgatgacaagactggagctcctttgacggattttaaaacaattgtagatatcttgaaattcagagttgccagttctggagactctgttgcgttccagaatactgatagttcaggaaagggttctaaaccgttgacttggaaaaagttcgaacatcgcgtctacgccgtctgcagttaccttattgagaagaccaatgtgaagccaggtcaatacgtcatattgatgtattcattgtcggaagagttcgttgttgccgtatacgcctgtttgatttgtggtatcattccaattcccatgttgccatttgattccaacaggatcggcgaagatttccctgcctttgttggtgttattcgtgatttcgatgtgagtgagattttagtaaatgatgaagtggaaaaattcttgaagaatggcccagttgccgattcattgaagaagatagctcatcgcaagtccaagattgtcatcaagaatacattgaaattaaccaaggtatccaacatagcttccttaaattctaaggtggccaagtatcaggcagcagtaaacttcagagatgagaatactacagctttggtttggttgaatttcacatctgatcactatagagtgggtgccacgttgagtcacaagaacattattggtatctgtaaagtttttaaagaaacgtgtaacttatcttccaaatcagctattgttggatgtgttcgtcattcttcgggaattggctttattcaatctgctttacttggagtgtttttgggtaccacaacttatctcacgtcaccattcagttatgctgccaatccacttgcttttttcttatcccttgctcgttgcaaggttaaagacgtttttgtgacggaacagatgttgaagtatgccgcagtcaagtttacacccaagggtttcaatttgacaaacttgaagaacatgatgatcagtactgaaaatcgagttgaaatagacttacttagaaagattgctaaggtatttcaacctacaaagttgagtgctgcatcgatgtcaactgtgtacaaccattacttcaatcctatcattgcaactagatcatacatgacagtagctccggtggaccttttcttagacccaatagctttaaggcaggggtatgtttctgtggtgaatcaagccgaagttccaaacgcattacatatacaagactctggaatggttccagtttgtactgaaatcgccattgtgaatccagaaacaaagagaatatgcaaggaaggcgaatttggagaaatatgggtttgttctgaagccaacttgacctctttcaccaatggtcccaagggccctgtagacaagtttagcgatatccagttcaacggaattatagctgatggagaccccaacgtagtttatttgagaacgggagatttggggttcttacaccatatatcaattaccaagaatggaggtgaccccaacgacaataatgatatcacatcgttccagccactttttgtattgggcaagatagcagatacttttgaagttatgggtttgcactacttcccgatcgatattgaaaacactatcgaatcttgtcatgcagacatgttcaagaatggctcatgtatcttcaagtgtgccgattacactgtggttgtatgtgaatccaagagacatagatattttgcctctcttgttcccttgattgtcaacactgttttgagtaaacatcacatagtagttgatattgtggccttcatcagaaagggcgaatttcctatttccaggttgggtaccaaacaaagagccagaattgtcgatgcgtgggttcaaggagttattcctattattgcttcgtatggtgtaaattatggagagaatagtatgatcaagttggtgaaagaaatcgacgttgttgccagagaccacccaatcacgggtttaaagaatccagctttatcgtactacgatactgatcttgaagagatagaggatgtatttgacgacaatcgggaaggtttagttttgaatgatggcaaatttcccgagggggttgacagaagagcagagttttctgtggggaactacagcaccagcacgaaatcagaaagtactagctagttttaatgtcctctataggtaattttgatgattttaatgatacattcaagatgtagaaagagcaaagaacttcgcaaaattagaaagggtagtaaaatcgtattggtcattgtaagattagtaattacgtttatataaacagcagattataacaaacatgttgtagatgtccatcatacccagtactaattctatgtcgcaatggtgtcaattctgtgtcaaaaactgcatccttctgtgaaggaaaatgctacaaagatttttgctcagctaaagattcaagattcaaatattcaattatcaacaaatccaacagattcacaaacgtggaaccagtcaactatctacaaattccgagtatagcatatttgcgtggattgtctatccgggtaatactaaaaatttggttagaaattatcaatattactcagatcgtgatttatttcattctcatctcgagctgtcccttgaaacagacaaagaaaaactacatcacagaaactcgtttatagactaatacctgaatttgtgattttgtttcctattattctagttgtcgattgagtgttgctgttcgtatcatctaattgcttatagtatctattgttgatcatctaaccaaatagtaagtgaaatttactattttgacatctacactgacactgaaattctattgttgtcgatttcattatgtcctacaatcgaaattcgataagccctacaactgaggtttcttcagaagagaccaattcctctaacacttccaatacaactgctccgtttgtgtctacactcaagtccatatacaactacttcaaagacaaggttccgcaaagcagtagtttcaaaggggtcaacacgaagatttcatttccaggctattctgacgtcaaaatggttgtggacgaaccattacttcataatttcagttctgagaaaagaagaagactttcagcagctgcgcatttgtcgaatggatatgttcctcgttcttccagcttgaagaacaacttggggctctaccaaagttatagaaataatattcagatcaacgaagaagagaagaataacgatttggaaagaagactcagtacttcttacggtgatgccgtagtgaagaacacagttcctcagtatatagaggttccgcgtgtagtcaatggttccacgatctcgcgtgacgagtcacctttacatattttaccttctatggaaaacggtcttcttgctattgatatggattcttccaccactgaaagtttggatggtagatcagaagttctaattgatccagagttcgcaccattatatacagatgatgaaggaaacttggtgagacctccttttatcaatttggatcctagagaaagataccgtcttcttcagttgaagaagtcgatgcaagcatctgaagctttacaaagaagaatgaagtatatggttaatcccagtgaaaccgtttccaaagctatcaaccctcaatctaatatggttgaaacgtctacacaaactcatgatatcgcctacgtagataaactcttgaagttcaaacagagaagaatagcgatcccaaagagaatcaagaaggctcataggctcaagaacacacaaggctattttgttggtgagttctactatgacgtagacaaaatagatgcaaacaacaaatcttccaacatgttgaatggctatttaggaacagtaagtaagccgtcttttcatgacaacaaaacagaagaaaaatttgaaaagagtacaacaaacgctgatgaaagtgaaccgttcacgaagtttggcaagagtaacgctagaggacgtttggatgaaaaaatttcgaaccaaaaagatttgaagcttgattcttcatacgtggaaaaatccaagaaatacgctgaaatcatcaaattgaaagaagatacacctgtggatgaaaagaaaaaagaatcgcattcgcttggtccaagctctgggttcaagttcaatatcaaaggagaccaattagattctataattaagaaacgtgaagatgacgataagttggtaaaacaggcgaaatccaaactggctcaaataccacttgaacggcagaaactgaaatctgatatcaaatattcctttggtgcacagaaagacaaaactgctcacagcaagattgaaaacccaacgttgcccaccttaacattcgggaagaatgaaggaaagaaagaaggttctctactgtcgtcaagtaagaatccagcacctgcacctattaacttaggtaagaaggaagaaatatctgatccaagaccaaaatttgcattcggtgaatcaaaaccaactgaagtcacaaagccttccttatttggaaaatctagtggaacaagagaattttcatttggtgcacaaaagactgatgacgacaaatcttctaaaccagccatattattcggctcaataaataaagatgatgctgccaaagcacctgcattctcgtttgggttatcaaaggacggattacccgacgacaagcaagataagccaactccctctattggatctggaaaggaaacggatcaagggtctagaaagcgaagcgaagaaacatctgcattttcttttgggcaaaagaaagacgaaactacgtctgctctgagtctctttggaaatatctctagcaaaaacggagaaccaaaatctgataagcacttcttatctagcggtgcggaaaagaaagaaataacaccaaagtcgacattcacatttggtgataaaaatacaccccctactttgtcattagaaaaggagaagaaggatcaaattatttttagtaaaccagatgaaaattccaccgataagccagcattttcatttggagcaccaatctcagaaaagaagactgaaggctttacatttggagcaccaagctcagagaagaagactgaaggctttacatttggagcaccaagctcagagaagaagactgaaggctttacatttggagcaccaagctcagagaagaagactgaaggctttacatttggagctccaagttcggagaagaaatctgaaggctttacatttggagctccaagttcggagaagaaatctgaaggctttacatttggagctccaagtgcagaaaagaagaccgaaggctttactttcggagctccaagcacagagaaaaagactgaaggcattacatttggatctgagaaaccagcaaaatcatctatttttggagattcaactggagcaccaaaattttcatttggtaatgttgacaaaccacaagaaactaaagcctctgctgcaatgactggatcaacatctttaggtactactacgccttcattaagtaaacagacatctcctgcgttttcgtttggttctgctgctgatgatacggaaaaggaagaatctcggggtaaaagaaccagacctgcattttcctttgattctactgctgctacaactccagcagctaagccaacattttctttgggtgaatctaattcaactcctaaatctggcttctcttttgctgctactgctaaagctgccactcctgtaactacatttggcactggtacaccacaaaactcgtttggcttttcgcagctgtcgattccaaattcgaactctaacttcaaatttgctcccggaataacacctactggcggtgccagtggaggtttcaagtttggagctgctgcagctccaagttttggtagtagcagcaatattaataattctagcaatactggcttgaatggaggactaagtagatctgctacacctacgttctcgtttggtaatgctaacgcaaccgctaatcctgccgctgcttcaacgaacacggctgctgctaatcctgctgctatttttggacaatcttcaagtgttccacagttcagttttggagctcctaccagcaaagaagctacgccagatcccgcatccgtatttggtatgaacaatagcaatgccaatatgggaagcagagaagccaccccgtttgcgtttggaacgggaaccggtgtcagcaacccagcctctgtgtttggtaaccctggcaatgctatcagcatgccagcacccacggctggatttggtggaactccagcatttgcgtttggaggtgtcaatggcggtgcaggaggatctttggctcccaaccaaacacctactccacctttgcagggccgaatgattgcgcgcatgcgacagagaagaagataagagtagtggggtacatggaagtgctagagaatagaacaaggttagagtaataagcgaggtacgatatagaacacaatgtcgtacaaaatgtagatgattacgctaaaaatatcgacagtgtaacacacttgaccccagtggataggcagagactccagagatacaaagaaagttaatccttgctcagatgacttttatgcgataaagacattgtattcgagatttgaattgaatttaggcattattcaaagtggaatttaggcattctgtcaagttggttctccacgctttagtcatatggagaagttagataccggcaatagtttcagatgaaggcgacatgtgacataactgtcatgtgaaggttttgattaccccgatcatcagttttgcaagcaggaaaacccactatttcctaatggggcaactttatgggggtggagctgggacggttgaatttaaggaattgccagaggagtgggcagttgaatggagtagatgaaactagttccagtcattgacaatacagttaggtagtaataaatatgaaagtgttgagtttaaccgtagtcagaatttccttttcaaataaagttcaacattttttcgctagcgaatttttcaaatttttcaaccggtgagagtgaaaaatcaaggagccgaaaaattcacgttcccacgcaacaaattaccaacccagaaccaccgcccaagtctgtaaccagcaagtcgaggccacctcagaacaaacgctacgacctcctacgccctgacagcttccagtttcccgcagtgaacgtcgccacagacacaaaactaaaaaaaggcctcccgtagtagttccaccgcggtcgtccctgcacgcgccccacctttgcgaaatcacaagtggtttaggcatctccttttctcccactacccaatctagttaaaccagtgaatgggcaataatcggctgtgcgtctatatatacccatttatccgctctcgacctccagtctgactatttctgtcaccacttgtttcttgttgcttgtatgagaatccaacatcccagcatgacttacccccaaggccagtaccagcagtaccctccgcagcagtcgcagcagcagtaccagcaatatcccccacagcagtacccaccacagcagtttgcgggatatcagcagccggtccagtaccaatacctgcctcagcaacagtttgctgttcctcagcaacagtacggtgttccccagcagctccagcaacagccccagcagcaacagcagtactaccaactgcttgatccttcggcggcctacaagcccatccagccgatcgcacaagctccacagccaaatgttccagtcattggagcaggcaatcaggccaacggagctcaccatggtgcccaccaccacaagcaccaccacaagaagagccatgacggcagccatgcccaggctggccagtttgactctaacggcggggctcacggcccagctctgaagtcgcatgccaacaagcagaagaacaagaagctgaagtccagggccacccctcctcccgtgattccccacggagttaactatagaccagccagaatccagtccatcaactccgaacaggaagtcatcttgaagcagggttgggcctacatgctcaaatactggggatacgaggtcggcattgatgccgaagatttgcctttcaaggaatgctatgtttcttcaagttctacagaaaactaccagtaccagggctcgttccacgaattggtcagaactagcactagaggttcggtcaattcgagttcttctaacaaaacctccggtacttcgggaactaagaagaaaaggggtctatttggcggaaaggctaaggctccagcagctgccccaaaacctccaccaaactcaaagcgtatgaagcaaatccaaaccagatcgtcatttgaagtatacgagcctgttacagaaccttcgcgttcatacatcgatgtctaccgtcactactttcatccatctttccactttgacaaggaggctgtatacgaatcggatgacgatgaagactacggctacggcgacaacgagtcgcagttgtcgttggaatcatttgttacggctgaaacgtccctcactgacccagacgacttgtcactaatctctggtcccacttcgggcaaagagtacagaaggcagaatggcttttacaacggtaatggaactaatggcaagaagaagcacgcacctgtcaaagtggaagctcaaccttcgctcttgcctgtattctctcagtactcggccagagatcttcacacttctttcatcaccagtatcagacaggacttggtcgataacttcacattgaggtttgtgagagccagaaagtgggagaccgagccagctattggcatgctttgcaagtctttgaactggagagtcaatgagatgaagcctaatgactggttttttgaatctgatggtccatcctatatcaatggcaccaataagggtttcgtcaagaatttcactactgaaaagtcgtggataaagggatgggattgcaaccacaatccagtttttatgttccaggcaaagaagcactttggtgcggattcgcctttgaatgaaacacagaggtatgctttgcttaccattgaatgggtcagattgttcttgagagaagtcaaagactcggttgatcagtgtaccattgtgtttgatttgacaggtttcacgttgaagaacgctgattacgccaccatcaagtttttggcagatgtgtttgaagctcattacccagagactttgggttcaatcttggtgcataatgctccatggatcttctctactgtctggaacatcatcaagaactggttggatccagttgttgcctcaaagatccatttcaccaaagacattaaggagttgagcaagttcattgatcccagattcattcctgactacttgggcggtgaagacgacagtactggttactatcctgttcccacagaagctcattgcaaacctcctaaagagaaggatgaacattaccacaagttattaaaggaaagagactcgttggtgctcagattctttgaaaccacaaagaagtggatcgagtcgaccaatccaagtgtttctgatcgttacttgcaagacaaaatcagcttgaatatcgaattatcaaacaattacatcgaattggacccttacgtcagaaacctaggtatctacgacagacttggcaacttgaccatcgacaactagaccttgttaaaattacctcaactcttcagattgtacagcttgtttttgctagagtactcatatgtattttgttccctgattattggcaagcttgaactgttaatgaaaaactcttcgtattcgtatttatatttatctaactactgtattcaaaataaaataagtggtctattatgcagagatttgtgtgagtctgactctaatatagatggtcgctctcaacagtagtgaaagcagatttggcaatatgatgatattcaagagtaacagcttgttcatctccgctagccgagcaattaattttctggcgtaccttactagacgcatgtagtgcattaactccgcaaaagaggggggtaacgtttccccacaagcagcatagaataatgcgacattgtcgggattcatttctccccatataatgaacattctgataagctcagcgtctatgtgcttatgtgctatcagcagtcctttcatccgaattgttgggttaatacaattggattacgggtacgggttttaacagctttaaggaaagattttctaaggctgggaaatccagtctcaaaatttggttataatggcaactatttacatttgtagttagaatgagctttagttagtatgtgcttagttagaataagaagtgttgtattcaccattaagaaatttaacctagtcaactagcaattatatagctaataccagtattcttctgatggctgtttggtcataatatagaattaatgcgaaatctttggaaataagttgttagttcctgataaaatacttcaaaaatgataaataggttagtaagccaaactagaagggcacaaactcaattgttccagtatactgagtcgatgaagataccacagtttcaatcgaatggcaagggctagcaccgagcttattttaaaattcattttattacccacggaacgtcgattgagaaacatgctgaaatgtttaactagatgtaaatctttcacgaaaaataaataaagtaaggaacccaaatcagaagactgagtccgccgctgcaaccgtgatgttgtggctttactcaacctcttgatatgaaaattgaattcaacgcaatggcaattacattacatgctaatcagtctttgtgctatcatactttgagttgtttgcggcatggatgttttcacagtggaatttttcacaaaatctaatctacactctgcttagtacagcatcttcaattgattactcttattttcacaacaccgtctaagccgttctcaattctcagacaagatacaaacgctcgagtacacgcgtcatgcctcgtcgttcaggaagatccagatatgcggaccagtcggagccgacttcagagtttgcagcagaagacgagataaacaactacgaagcagaagcagaagatgaaatcgatgatgaggaacaggaagtcactcgttgtgtttgtgaacaagacgaattgaacacagcattggtgaatccgcaactatcagaggttctaatcaaggaatattcaatcaaaatcgaccagggacttttcatccagtgtgacaaatgttcagtatggcagcatgggtattgtgtagggctcttcaccaacgatgaagttccagacaagtactggtgtgaattgtgcaaacctgatctccacgtgtttatatatgataatggagaagccgtgaggacactttaccgtcctgtcaacgaaaagagacgtaagttactgttggaaagtctcgctgctggccagtccatccaacaaaagacaagttccagactgcgaaccaaacgactggcactggccaattcgaattctaatgataatagcagagaaagagaaaaagaatcagggaataacggaaaatctcgtaaagagagaagacattatgatgaatcatatgatgaacaacttcaaaaggctttaagagaaagtgcaaaggaatcaggattaccattagactctgagacttcatcgagaagaagcaacaacaatagcaacaacaacaatagtaataataataatagtaatggcaacgattcttcgagtgtctcatcgtctggatcgatttctttacggagaagagccaaatctgaagattctgacgatgccaaacgcaccaagcttgaagttccggaagttgctgattcagatactggagagcatgaagcttcgaacattgaagaagataacgaagatgaatccaagccaaagtacgacacaagaaggacgaaacccaaaagtagatcaaccaaacccaaaaagaaaggttctcataacggagccaatagttccaagtctgcatcgaatgacgaagccagtaatggtaatctggctttttccaaggaggaactcgtcaaccaaccttcaaagccacgttatgtcagcgataaatcgtccatatacgaattgcgtaaacgcaccggcgctattcttgaatggcttggtagatcacaactcgagctcgaggatgaaaaagtcaacaaaatccaactcttcacattcaaggaaaagaccgaaagcgaccaaaatgtgatagacgaagacggcaacaaggtcattgtgaagtttgatgagaacttgaaactaatggaatccttgacagagaagatccttgcctgggaacagaagttcggcaagtacgctccatgaatgtacaaccctacgcatatacttttctaatatattgttataatatcatgaaaacattatcttctacagaatctatataaactatctgctctacagagaatctgaaatatctttaggagtcatagaatctctcgaagttgctttcttctatcggtagccgggtcagtaccaggaatttccgagtcatttacgcgatcatacaactctttcatccacatctcactattgagaacattgtctccaccaatgacaaggttgattttcttgttgctttcactcaattcaaacaccaatcttgcctcctcgaaagttacaccaccttttacgtagatgatcacatcttgaacaggttcattctggatattattgccatattgggaactgacagcatctggaataagagtggataaggatgatttgatggctatggcagattccagttgtgtagtggtgagcaaagagttcaatacttcattcaagcgcggggtatattgcaaatagatattatcagttttggggtcattcgacttgttttggttgaaaaagctgttgatattgatcttcttgttttggaagatatttccaagattgttgctattattctggccgctagttgaagtggtgaagttggaattgaaaagagtcttgaacttttttaataacgcaatttgcgataacgtgggcaaaggatcagtgaccaacggattgttcaatttgccaatgaagttttgcaattcgcttgtgttgtgaaatctgatcgaatacaacaataccaatttgattttgttagtcgtagacacctttggattgtccaagatttccgtcaacttctgcctgatagcttggtgggtgtcaagttcacaaataatggtctgctgtaattcaccaatctcccataagttttgtatagagatttccttgtcgatttcactaatcaagtttaaatgtttaaggatattgttggacaacttcttgaactcagggaatttggttaacatctttttcaactctgataaattctgcgtcttgaggttttcaagagacgactgtttagtttcttttttatactcttctacgtatttttggaatttttcagtcaagtctccgtagtttaagtacatggactccctgtagaacttatcctgcgactcgttcaaagtcacctgctccttcgactctgtcaaggctacaatattctttttgatgcctaagaattcgtggatcatagactggtacgtccatggcgttatcaatggcgtaatgggatcattcttacggtctagtaaaagcaataaggggggtctatccgacttgcgattcaagtcgtcaaagaggttgttgttggaattggaattgatattatacaagatttctgagctcaaacgtttaagttccaaggaattggactcatatttaataatgggacatttcttcaaggaaagtaacaaactgacaagactattagattcttctacgactggattaatggcattggctatgggctcgctgacgttgatcgtgaacaagttgtcgttcaaaattaggtagtcttggaaaatctcagtcacctgattgatgacttcaaattcatctgcttcagccaaacgttcaagctctcctttgctaatggtattgttcaagaacaactgatacttgctgaaatgaggattgttcaattccttgatcaaactctggatcgattctcgtgtcggttttatatagacgatacaatttagatgcttcatgacattgagcgtgctttggttttcgattaactctatcaaaatgatatcgttctggagcaattgcgattgcgtatagcacatagagattatgggtgtggtgaatttgtctaccaacaaaactttggctttaatctccgagtttgtgctcagttcatttcgctgaacagcaaagagcttctcgaagtagacattgctcactttagcgagattgagagtcattgtgcaatatgtggaaagagagggtaactaacggcaaatttgagttggcaaactatgtagatgaaccaagcatttgcccaaatgcgagatgggtcacgtgataatctataatatgggcagttagtagataatgaatataaaattcagcataaactagaatactaatagattatgaatacgatgtattaggtagtaaaggaatataatatgaataatgtatgcaatgtattgctacgggtctatctagagtctagttataagtgtgggttacgtccaggatagtaatatttggtcaaaggctctactgctgaaggaactcctcccaaagagtagtgttttctgaattctgaaatatccttgtacaccgttccctggcggtatttggtgggaactggagtcttgatatcgttttcaaaagcaataagcaaatcttgtttcaagttagctggtggtttgttggatacatattccagaatttcttcagcaacttgtttaaccaactgttggtgattttcaagattctccttcactatggattccaacttttcggtggaagcctcgtagccatttctgtagatatagtttataatagaactatgtgccaacttgagcgttgtctgttcaggaggagattgcgaattcaagtagacgacaagcttgccggacttgtcagatccatcagcaatgtagttgttaaagaaatcgacaaactcttccttactgatggtctccaatatcttaacatgcttctgtctggcttcaaaatcaaagtagccatcagtaatggagttccagagtctagaagtttcttcgttcaagtgcttcaattttgataatttaaggtccttgagtgcttgcttgaatttgacgaaatcgacttctgtcaactctgagttgatgtgcttgccaaacttgcccaaaaactcatcaattctgtactccaaatagtctgcagttctttccgactgaaccaagattctgaaacctatcgacgttctgcccaatctagtaccagaaaaaactacgtaacctagttgttcctttgtcctcaattgattgaagcaaggttcacggataatggtaccaaataaatcagtcaacactctcaatttgggatcatcgttcgtgggactgatctggatgtagtactcaatacaagagttaatatttttctcatcttgcaatggcaattcgtatctaataaactccttagatggaagcacaaagttctgaagcttgatggctttgttgacatcatctaaagtatcagcaataggagcaagactcttggtgtgactagctatcaattttctgatttcatctcctttggcgatatcaaagttaccatggatcaaaacttcagtaaagattcctgatttccaaagattcttggttgcaaactcgttcaattcgtcaaatgaaagatcttcgtccataacttgaactttttcatcataagtgtaggttttctcgttgagcaacagtaaaatatgagttccaatttgacggtacggaacatcatatccaaaattcttgaattgttgatacaatttgaatctgatagcttcaaacctttccttgttaggtttgaaattaaagaatttagacaaaacctgatctaaaagcactggaagtttgtcactgtaacctgatactctcacgttgaatccatcacgccagcatgatatcagcacctttaagccaaccaatgaggcataataagtgacttggtttaattcatcggttatcaattcagccaacaaagacgagtaggtagaagtcttcttgtccaagttggagttgggcaaatggaacactatatcgatattacctttgggaacttcaaaaagatcgtcttgcttgtaccagacctggagcttgttgctctcttcaatgaggtaaggatgttgcaaaggagtttctgacttctttcttaacacttcaaagtccttgggaatgaaatcgttgggtttgggatagtgaaagtgtggattcaattgcgccgattcaacgttttgtaataaatctactggtatatcttcataagcatactcagttccgtaccatttttcggacttgttcaagccatctaacgattgcgaaaccaaagaaatcttgaaattgtttggattcaagaatttgccaaagtctatgatctcctgtttgttgaattctctgtaaacagaagaactcaaaatgtattctggaggaatataaccatctacagcaaacttgtacaaagtgttgctcatcagagaaacagtgttagcggcatctgccttttgcctgaacttgaagttaatggcagacatcatagagatctcgtcgtagatccattttttgggctcttctggaagaatcaacttcaagtactgaaacacagaaactactatctccttccaattctgcaacccttccggagtcaactcaaattcgaggataaagaaagagttaccctgacagactcgcatgttaccagacgacaattctgttacccaacccttgtgtttcaagaagaaaagcacagagccttcgctttcatgtcccaataaatgggagaagtagccgttgggtttagatttccatttggtttccaaatcatcaggaaccatgaatgttaactcgagttgatgcttgtccataatgggcttggccctggtcaacttaccgaggtacttatctgtcaagatgacttcgccatggaagtttggtcttgttaagctcttgttaggcacggccgagaacttctcgatagcccaagctgacaaagtgtccaaatcttcctttcccaacacaaccaaactcatcaagttcgacgagtagctgttgctgtagaaatcgagcaagacatcacgaacattgagtcctctttcagaaggctctacatgcaaagtctggtagttacctgtagaaaacccattgtaaggatggtcagggttactgttcagcttgtcgagctggtagagtctccagagatcgttttggagattctttttgttttctgagtctacagcgtttatttctcgatccttgcagctctggctaaaaaggggtgccacgaagaattgagcaaaccggtctagagcaccttctaagtagtcggcacttacctgaaagtagtaattcgtatgttctgctgcagtataagcattggagtacccagaatgtttcgataaatacgaggaatattcattttcagccggatacttttcggtacccatgaatagcaaatgttcacagaaatgagccaaaccaggaattccatactttttgtcagcgaacgagcctacattgacatccaaagaggccgcagacttgtcagcagttgagtcatgaatcacgaggacctggagatcgttcgagtcgagctttaagtaacgataggttctgttgtcgagaagaggcttctcaataacgtcgttttcggccaagaccgtataatgcagcatgagatgggtgagacgggatgaggtagagtagcaatgcttgaaaaggaagtggtgtggattcggcgaagtagaatttaaccaacttactgggagatttggcgaagttggaaaataaggtggaaaatttgaagttggagacgtcgaaatttgagaagtgggcgatctgggcgattttggtgatgttgccttcgacgaggtcaaactggcgatgttctgaacgagaaacagactcaaatgcgaaaaaggaaccaacagcgagtaaatgtttcctcggataagaaacatcaacagaattccgacagctaagaaaaaccaacacttcattaaccactacagttcaccttcaaagttcaactccactcactcctccagagtgcatatgacagttgtggggatgagtgtgataatcaatagtggttacggagtacgagaagacaaaagtgaaaggtagagaaaagtagataaaaaccaaagatcaaactggcaaacagggatactgtggagccttagcagaatagtgtggtttggattgcagagaatagtttgttcgttatatatatacagagatgtaattgtttcttcatagagtttgaattgtggagcgtaatagtgggacttggtaattaagttacttaataagagatatatgctcgtagagggaatacggacttcaggtgggacatttctgagagtgtcccatcagaatgtgggatctgttggattcagtgatgaaagtgtcgtacgactactgaaaagtttctatgacggtttctatgacggctttgtactacaatctgttgattatacccagccgtgcagtttgctagatgtattgaagatgacgaagcagaccctatcaggaatacaaaggttatagaagagttctatgatgtatactctgtattgtaattctagtgtggtctcttcggttgataatgatatttgtagtgagagtggctgcgaaaagtacaataacacgtaaataaaagcacgtccaattattgctacaagttctcttattaacctaaatattctcaatatccctgcccaattagttatactcgatcacaacacgtcaattaaactgtccaagttcagaataaagctgctgaccaaatactctacgctgtcaagtttcgtaaaagcgctcaccaagaccggatcgggcgaggatacctctatcttcttgttgatcatcaccaccatgccattgtaagtaacacacttggtgatgtaatctacgggatcaagttttggtctcaacagcaaatggctaattacattgctgaatataccagcagtgctttgactagactctggggcagaatctttgtgccccgccaattcatggagtcgttcctctatatcggcagcatttagaggaactgaatggtcagtagatgatggtgttgatattgtagccgaccgagagctgggtaacttcatctcgtctctgatcttgtcgatgtacgacctaccagtggtgggttcgatttctccccatggcttttccgtgaccttatgtaggttcttaaggtcaatgcagacctcagcttgtgatatgtatacgtctacagatatagacggcacaagctctggctcaaacgcatccggcggagacacatgaatggggaatacgagatgggggtctgtcggaagctgaagtgcgcttttggcaatctggatattaagcaagagttcattgaacgaatctataagcttacgatggtcagcatgcgagcagtcagtgagcttcgtgagttcttctatgatgtttatagacgtgtccacagctctcttggctgttatgatctgttcgagtaagatgggtttcttcaaatgtaaacgagtaatgtgtctgttgaagtgggactctcgcaatgttacagtaagctgggttatataagctccatcacggactataatgcccttaagggcttccagcttcgtcgacgaaacaggcaacttgaccggaggcccgcgttcaccgcgcgtgttgtctgggtgttgtggcgaattgtaaagtagaagattggagcagatctggagtgcttcgatgatctgaggaaattccggggtaatgataaaggcggtgagccaatggagctcggaatcggcctgactgacctgtatctccaggacgaggctgctaaagtcggccatactaccaatctatacagacagacaagaaaggatagaattgcactgaattgtgtagaactctgaaattgtacaattgagccaaggcattcttagcagaggtttaacagactacccagatatttcagcgtattatcaggtgattgtggctcacgtgcatcacgtgtaacttctgttctccgccaatagaaagctgtcgttgcgggatgtagatgtgagcacgggcgaacctgcaatcgggatgcagtttggcaatgggtgcaaaagatgaaagacttatcttagctggtagttgaaaaggaagctatggatgggctgctgttgctgtcccggtctctgtgggtaggacgttcctgtctggcgtttcctgtctggactgaggctcctgtctctgctgtcttttcctgtcttttggttgtcctgtctagctctttggtgtcctgggcagatagtgagtgcagtctctatatagtatatagcagacaacggaacttgcacagcagacaagaaacagagcatataacagacacagtgacagacttgtcccacgacatacgacattctgattctatagaagatggcctatatatcctccacggcagatatcacccaccttgttccttatgagaatctcccatacgagccgactcgaaatagcatcgtacagtttgctaacccgcactctcgctgaatttctcagcacgcaacatcaccaactttttgtccaacatcttcatgaaggacaaatccccaaacataaataaatcccatacactccttcttttctaccagacctcttctacttgtgcaggacgcttgtttatacacaacgactccaacctcccactccaggctatcagagtctactgaccgtgtctttcaaacccgagcttgctaacactggctttctcgctttctcagagattttttagcactattactgtctattttggcacgttcccaaaaaccgatacatcattttgacaatgctgggtccttccacttcaagtgagcgttctactgtcaacagcggtggccagcaccttcagcaagaccacactggtgctacctctgttcgtactgagtacgacgttactgccactgctgctgctgctgttctggcatcaggctacggcgtgctgttggacgatgctgcctcgcagttccaccaacaccaacacaacaactacgctgctggcgctgctgctgccgccgcggagattcagcacagacatgagcttcagagaagacaacagcagttgcaacaacaggagctccaccagcaacagcaggagctccatcaacaacaattgcaacaacaacactaccaacaattacagcaacaacagcaacaacaccatcatcaacaacagcaacaccaccaccagttgcaacaacaacagcaccaccaccaattgcagcaccaccaacaggtggcccaagtcggtgctggccacgctcaagttgttggtgttggtggagttcagcctccaaatcaacaccagttgcatcaacactcctcgttaggtccatcgggtgctgacgactacgaccagggtattctcacgtcgaagtacatcgagaacgagatcattaagacgttttcgtccaagcaggatctcgttaagtatgtcaagtaccaattgagcaacgaggaacagtgtaagattgtcattaactcatcgaagccaaaggccgtttacttccagtgtgagcgttcaggatcatttagaactactgtcaaggacgctaccaaaagacagagagtcgcctacacgaagcgtaacaagtgtggttaccgtttggtagctaacttgtatccaccagaaaaggataagaagaagatgatcaagaaggaaggtttggacagaaacctcgatgacaagttggctgactaccccaacctgttgggccatggtggtcttcaagaagcttcagagatgtggatcttgagaatgatcaatccggtccataaccatgctccagaaccttccaatggcaagaagaagagactgaagtcgtcgagaacgttggttgaaaagcccttaaacaagggaaatggatatccgcaagaagtgatgcaattgcaacaccacaacggccttcaacaccaccatattcctcagcatcttcatgaccatcagcacccagcttcagttcaagacactgctgttattgctgccattgaagccactccagctgctgctgctgtcactgctttgcacgcacagaatccacccgtagaccctaatattgatcctaatgttgatcctagtgtccaggctcacgaccattctcatggtatcagaggcaatgttcaattgcacaacttgagaagataatccaatggatcatctgatgaagatgtaaaatcgaacatgtcaagataacccagtagttatctggatgttagccagaccgaggtgaaatgaagactctttgtgaagagaagaaagatgttattgtactttagttttgtgtgttgcactgttgagagacattgagatgcttttttatattattgttttactactactacttcttcgttttttattattactattacttctattcttgttattgttctttatgtttagtgtatatctattgttttagagaatgtagtttatgtagtacggtacagataagggaagtatgttctcgcaccgagcagcaacactgtgaattccactatctctaaagtctacctctggttcagaccagacttgacctctacatctgggggacaaccttaccatccaacataaagtgggtcactggagcgtccagattcaattgaagacatgagagcatggttctggcactgcccacgggaagacatgagtcattctcactgctgaatctactcgtgtctcgttaaatttcacttatctcactaaaaaagtataccagaatagcgagccactccaaaagacacacccccagaaccattgctttgctactttattgctctgtattactcacaatatctcaccctgtaatgctagtaaagttatctaagtaccatgtcttcttaattgagtcattttatacggaatatcaccatctcgctatctattctaattctacctctttctttcgcgtgcgcacatattcagtatcttttttctatcttcaaatctgaaatttttcactcttctcttcttcatgctcaagaccctcttcaagagaaccatgtccaccactaccacgtccgagtggacggcttccaaagtcagatccaccttcttggactacttcaccaataaaagagaccacaagtttgttccttcttcctcggttgttccacacaatgatccaactctcttattcgccaatgctgggatgaaccagtacaagcctatcttcctaggcactgcagacccagcctcggatctcgcttcattgaagagagctgccaactctcagaagtgtatcagagctggtggtaaacacaacgatttggaagacgtcggccgtgactcgtatcaccacacattctttgagatgttgggtaactggtcctttggcgactacttcaagccagaagccattacttgggcctgggagcttttgactgaggtctacggcttggataaagacagattgtatgtgacgtatttcgaaggtgacgccaagcagggtttggaaccagatttggaggccaagtctttctggcttaaggttggtgtcgctgaagaccacattttgccaggaaacgctaaggacaacttttgggaaatgggcgaccagggtccttgtggtccttgttctgagatccactacgaccgtattggaggtagaaacgctgcttctctcgtcaaccaggacgaccccaacgtcttggaagtttggaacatcgtcttcatccagtacaacagagaggccgacagctcgttaaagacattgccagccaagcacatcgataccggtatggggtttgagcgtttggtgtctgttttgcaggacaaatcttccaactacgataccgacgtgtttcttcccatctttgacaagatcagagacatcacgggtatcagaccctacggtggtaaattcggcgctgaagacaccgacggtattgatacggcctaccgtgtcattgctgatcatgtgagaacattgacgtttgccatttgcgacggtggtgttcctaacaacgacggtgctggatatgttttgagacgtatcttaagaagaggctctcgttatgtgcgcaaatacatgaactaccccattggttccttcttccaacaattggttgatgttgtcatcgagcagaacaaagagattttccctgaaatcgtccatggtgcccaagacttgaaggaaatcttgaacgaagaagagttgtcgtttgctaagactttggatagaggtgaaaagttgtttgaacagtacgccatcatcgcgtcaaagactccagaacagactttgtctggaaaagatgtgtggagattgtacgacacatacggtttcccatcggacttgactcgtttgatggccgaagaagccggcttaaagatcgacgagcctgcttttgaaaaggcccgtcttgaatccaaagaagcttctaaggctataggcaacaaagacggtgtggaattggtcaagttggatgttcattccttgtcggaattagactccaatgctaacgtcagcaagactgacgactctgccaagtatggcagagaaaacatcaaggctactatccaggccatctattctagctctggattcgttgattctattgatgactcgtctgtacagtacggagtcttattggacaaaactccattctacgctgaacagggtggacagatctacgacactggtaagttggtaatcgacggtaaagctgaatttaacgtcaccaatgttcaagtctatggtggttatgttcttcacactggtaacattgtggaaggctcgttgaatgtcaaggatgacgtcattgcaacctatgatgagttgagaagatggcccatcagaaataaccatactggtactcacgtgttgaactatgccttaagagaagtgttgggcgactctgttgatcaaagaggttccttggttgctccagaaaagttgagattcgacttttctcataaacaagcattaactcctaaggagttggctgccgttgaatctatttccaacgagtacatcaagtcgaacaaagaggttttctacaaggatgtttcgttgaacgaagcaagggaaatcaacggcttgagagctgtctttggagaaacgtatccagatccagtcagagttgtttccatcggtgttcctgtagaagacttgcttgctgagcctaagaaggctgactggcacaaagtttcgattgagttctgtggtggtacccacgtagccaaaacgggagacatcaaggacttggtcgtgattgaagaatccggtatcgccaagggtatcagaagaattgtggctgtcacaggtcatgatgctcatgctgttcagaagatcgccctggagttcgaagctgaattggaccacgctgctggcttaccatttggttctgtcaaggaaaccaaggccaaggagttgggtgtagccttgaagaagttgtcgatctccgttttggacaagcagaagttaactgaaaagttcaacaagatcgacaagtccatcaaggacgatttgaagacgaaacagaaggctgaaaccaaacagactttggatgtagtcaatgaatggttggaaaagaaagatgctggggactacttggttgctcatgttccaatcaacgctaacgccaaagccatcactgaagcctttaacttgctcaagaagctgcacaaggacaaatcattgtacttgatcactggtttaactgacaaggttgctcatggttgttacattgctgacgaagctattgccaaaggtgtcaatgccagcgacttggctcaagctgtatctgccaagattggtggtaaggctggtggtaaaggcaacatcgtccaaggtatgggtgacaaacctgaaggcattaaggaggctgttaacgaagtgacccaattgttggctgagaagttgtaattgattgttgtagactagtagtagagttagagtaaactattcaagcaagagtagaactcttcagacagtagaacaatttagacaatagtggaacaacgttatagcaatagctatatgctttgatatagtatctgttaatagtataataaataatgtaaatgtataagaatgaaggtatagttatctaattattctatagactacaatgacgtctttgctggtggagcttcattggtcattttgtcttcttctgtctggtcaatttcggcagcatttcctcctataccatctacaacttcttgtacaatattcctcaagttctgtttcagaatttcaggaatcttgccaataatactgatggtattgatcttccagtccatatgaggatacgagcccaacttgactgtgccaacgccgtactttccgtctacttgattttgcaatttggtgagaaatggagccatttcgctttcgttagactttgtcttcacgtagaatcttgaaagagcggagcctgaagaaacgatcctagtcttgagatacgattcaagctcgtctatcagtcggttgaacaactgcggaactccaggcaatacgtagacttggtggtttatagcaacgataggaaaccagagttgttcgtcgagaaaaatcgtttctgtggtcgtttctggcttttttgaaactggtaaagtggccatcttgtaaaaggcatgtaattgctcctgtgaaagcagatcgagatacgagcctctgagtctgtgcattctagctacaacattattgtcgagttcataattgatattgtagaactcactcaagacagaataggtgatatcgtcgtgagtagagcccaaacctccagaggtgatgatcaagtccactttgtcttgttccaccaatattctgagggaattgacgatgtcgtctttatcgtcgccgcatactatggtacgcttcatgggaatcagcaacttattaaagcagaacttggcgaagttgtgtgaatttgtgtccaagatctttccgttgagaacctcatccccgataatgagaattccagcagaagcgatgggtttaaggctcgatgatccgaggctatcgatggaacgggcactgttgaaagctttggatgacatgacggaaaactgtcttgtccaacggagcataaatgagtacttgttgtagataaatgaaaaattagatcgctttgaattgatacctgaattttcagttgtctattcttgaaaaatggggttccaaccgaattcccacaggactctaattctgatattgcaaaatgacaatggagtgatggttgtgttcttcggttgatgggtttctttggcaatagtccggctcaattgaatagaaaggtattacaatttgtcagaactggtgggtagcagaagaaccgtatgatatttctgagaattgtatgattgataatgtgtggaaatgagtacagaaattttcgtttttgagctcaattaattgcacgtatatctagaaactgaggactacctttgctatgaaccttgaaacagatatcttgttatagcagagaacagtgtaaatcgaatcgctcttcagatattgaacccccacaagttgagcgtagatgaagaattgcgtgcgcgttctctctcgattaggcaatcaacattgtgcaaccaatttttgataaccaagcaaacaattatggaaggaacaggctgcaatttttacttacaaatgaatattaacatgaaacaggacaatactataagtagggagaatagatggagttgaagcgatcatgatttcataatagttcccttttctacaaacgaatttgagtaatatctcatttttcgcagcaaatacttcataaattaatatacaacttggcaaattcttacagagaagcaattgaaaagttacataatagttactggtgctagcatttgttcaaattgtagtcaccaagccgaaaaatctcgttgctacaaatatgatacttttacaatcataaatgtaccctcaaccgatctcagtatctttgcagtttgaatgcctccgaacaagagatctgtattctactccatcagtcaagtggcacttaggacaacatttcgacttcactcccatctttcccacattgccactttcttctgtcgtcgcttttctccctcctctgtctgtgaaactggctgcgaaatctacaaaaccttttgtagatagatgacacaaagctctttcctttcaaaattttctcctgccagtttcaaagtctttaccccatagcctcagccattccaaagccattccaaagccaagccatagattatacccatccacagccaacagccatccacagccagtaaccacccacccacagtgtgcacacagcataacctccttgttcctcttcactttcgtgtctctggaagccttggtcatgtgacattctccaacacggcggaatgttcagaagaaccggcactccgtacttaacacagaagagacgccattggtccattcagcagtgccaatatccatttcaaaatgtcgtatttctcgtactttcgctcacaaatcttgaacgctcattatgtaagcagcagaaatgttcattttcatattgtccattatcgagcacaaaagacgctgccgagtcggaaatcctgcactttcagataacgtaagctgacaacgtgccctctgtctgactccaagtgtctgcagacgacgaccataaggttcttgtgactttagtgtctgctgtggagatgggtatataaaacggggatttcctcaagaaacacacgacagcaaaacacgtctccaaaaaggaaacaggttcgtccagtctgataagctagcgttcccagctgttctggttttctagctttatttgagtcggattatcctgccatcgagcgattgaattgtcccggttttgtgtccatctctaccactatcttagctgctctctacccagcctatctccttttgtctgtgcccgacacaacatttttccacagttattgcatacagacgacattcactgcagactttaggactgcagattccgcttcattctcattgcagctgaaaaacgcaattcgctgacttttcaaaagtcgattttatcttttttctcagtattggaattagcgaaattagttttttgttctttcttcttattccttgttctttatcttttgcttactaactactttcgtatcctgctaatcgttagcctggtcctccgccttctatctttcccttctttccgtatttctcataactatgggtaatagcccatctaaagatgatcctctgccgacgtcctcctcctcaacactgacaggttctggtgaacttgagccagatgagccggcgcctgcgctatctcatctaaatcaccaacacgacacgacatcgacgacgcaaacgacgacaacgacacccggtagcagcctagctaccgctgcatcaaattacaacagtaacagcattagtaatagcaatagtaaaagcaacatcaaagatgataacatcatcaagaacgataaaaataccaacaataccaagaactccaacagtattagtatcaaaaagaaggtcaaatccagaaaacagtctcctccagactttgacctcgatcttgaaatcggaatgtctatggcacatttattgaagtcaaactcctcgcctccggcaagttctccgattgcagcaacagccagagacatcaacagtagtaacaagagcgttgccattcctgacactttgactccgccagccatgcctatgtccgagtacggctcctctgtagaaagcgacaagtctgactcttcagccatgtcgccagtattcacaactgtaggtgaagtcaatgatgaagatctgctttcgtctttaggctccagttctccttctgggaagaacttcttctataaagttgaagtcagagaacaaacatcttctgccagaaagttggacgccatcgccgaggcagaaacgtctgtagaatcgactcctgagcctaaaagagggtcaaagtcgagaagtagacaggcttctaaattgtctgtagactctgatcgcttgtcgatttccaacttgaagaaacacgacaaaaagaccagagagatgattggaagacagttgacgaagaacgtctcctccagctcgtctagcctttccagctctccacctttggtttatgctaacaaaaagatggatgtagatgtggatagcgtcatagacagattacttgctgttggaatgactaaaccaaaatcttcttccagtcgccacaccaaggataagttgcctgtgacaagttccgagattaaatttatcttacataaggcccgctctatcttcttggaccagcctactttattaagattgtcaccttcagtaaagattgtaggtgacatccatggccagttccatgacttgatccgtatcttcaacacctgtggctatcctccatactcgaactacttgttcttgggagactatgtggatcgtgggcacaagtctttagaaaccattcttcttttattatgttacaagattaagtatcctgagaacttttttatgttgagaggtaatcatgagtcagctaacatcacgaagatctacggtttctatgacgagtgtaagagaagattgcctgctatctctggcaatcataagatgtggaaagtcttcattgacgttttcaacacattgcccattgctgcaacgatcaacgataagatattctgtatccatggaggcttgtcaccagacttgcatgacttggaacagatcgacaacataaggagacctacagacattcctgagcgaggcttattggccgacttactttggtctgatcctgatcctgcaatcaagaacttcagtgttaccaactggcctaaaaacgaccgtggtgtatcttactgcttcggtaagaaacacgttgactatttctgctccacattcaaaatggatttggtagtcagaggccacatggtcgttgaagatggttacgaatttttcaataagagaaagttggtgacagttttctcggctcccaactattgtggagagttcgacaattttggtgctgtcatgagtgtggacaagaacttgtactgttcgtttgaactactcaaaccacagtgatccttatagactttgatactttgcttaatatttactttactctttgctttttgctttttgcttttttgttatgttaatttttactcttcgcctttataaataatggcaatgaagttgaatgcagcctctaggtatatctgctgctgccgcagactattgcttacgaactattccttcatttctttaaaccctaaacatgtccattttatttttatcgttagaattcttatactttggagatattcaatatatgtgctacttataaagatgtaactattgagattactttattcctacatttgttaagctacaccaccatttcaacgaaagaatatcttgctattgtactacaacacaacacgaattactgaactatgcacaaatttggtaaattcacattatctaacatatttaatgaatcaggggccatgctcagtgcaatgaatgaagctaggcaaaaggtatatacaagtaatttaagtgaatgaaaggtatccagtaatcacttcttcttaaagatagcaaatgggttgaatctcttgtatctgaaactgtagtaaaggaacaacacgagagcgatgttaaagatgaagtacacacagaagaaaccaacgtttctccacacgtaggaatacttggctccaatagtcaacaagtactggtccgcattgctgaaggagcagaaaccacattgagttgtagcatttggattgtccaagtatccaccactggctgcaacaaagctaccagcaaactcttgacaggtttggccttccggtgggttgaagagagcaagctcattttcactacagtgaataggacggccgtgcaagaaggaagcaaccaagttttgaatgaaataggtgtagggagagaccttgtgcataaaggtccagaaaccgggcatcaaatgcaccggctgcacaacaccactgaatgcgacgataaaggtgtaaaggaaagaaaccaagaccgcagcagtttctaaatctggtgccacgtaaagaaccaaacaggcaaatgtgacaacaaacgattgcaaaaagataccttgtgccaagtagaagacaccagcatgaggaccggaggtatcagcttgggtggggaagtaaagagagacgaacataagagtagcaccaaataccaagtaaggcatttcaacaattacctgacaaatcataatcaatgaccagtggtaagtgttagacaacttttctctaccttcgaacaagtcacgtcccttgattgccttttcttgaatctggttgataacaggagcagatacaacgacagctaagaaagaacagaacataccattttgggctccggtcatcgtgtgcttcaagccaaagaaagtgaacccaataaacaaaccacacatagtcatcaagaagaccttagaagcaatgtactcaggatctctccagaacgtcaaagcatttctttcaagaacataccaaaactggtaccagtaaggagtagcatactggttcttcatttggttcaattctcttgcagtgtagcctgattcgtcatttggcttggaagccaaatcagatatcaattggtcacgaaccttatcggtttctttcttctctgcagagccagaccaaacatcaaaccagttgtactccgtggaggcagtagcaccggcaccgatagcttccaagatatattcagcagggttttcttgagatccacattttctagcaccgttacgttcgaagtagtccaaaataactctagactgatcaccaatgtcaccaaagtagacagtctgaccaccctttcttaacaacaacaatctgtcgaattcctcaaacaaagtagcagaaggttgatggatggtacacaagatggattgaccagcgttggccaaatcacgcaacaactttatgatagcccaagcagattgagaatccaaaccagaagtaggctcatccaagaacaacaataaggaaggctttgcaaccaattcaacaccaatagacaacttctttctttgttcaacgttcaaaccagaacctgacttacctaccaaagcatcagcgtagtcttccatattcaaaacgtggataatcttttcaacatactccaacttctcagcgtcgcttatatcgttggatcttctcaaacgggctgagaatctcaacgattctctcacagtaacttccgcgacatggatatcctgttgttgcacatacccagtacgacgactgaatgacaaatccaaaggttttccgttgacaagcatgtcaccagtaacaacacccatatcgatacgttgagccaacgtgttcaacaaggtggtcttaccggcaccagattcacccatcaaagccgtcaaagtgccaggaatacaatatccggacacatcgtctaacaacttacgctccttaccgtcgtacggaatcacatagtcaacgttcttccaaacgaagatatctttcgatttcaagtcttcaaatacattgttcttagcatgcttctcggcagtagtttcactaccgagttcgttgtcgtacttgccagagagaccttcttcatcgtctggcgaagcagatctatcctgaggcaaaacaatgtgatctggcaccttaccctttaagaataataatctgtcaccgccaccagtaatgggtcttacaaattcagtacctaaagcagtgacagtaacgaagaaaatcaagaaggcaatcatgattccaaaatttctccagacatgactgaagctgtaagtataagctgtcttcaagtattcgtcacctaaaacccaagtctgacccaaaacggaccctttgaatgaacaagcctgttcaccaggagacaagttctcaaagccaggaccactaggaactaaatactgtccatcacacaacatatgacgtccatggaattcagtagcaacaactgcttcaaaagcatataacacggggttgatataggaaatccacttgaaccaagggtgcattgaaggtctttggatcatgtaagacgagtacataagcgaagcaagaacaagaacacccgcaaaggcattagcactcgaaatggtcttattcaacgaagcaacagcctggaacaaagccgacatagtcaactgcaataaaaacacaaacaaaagagccgtgaagaacttacctgcttctctggccaagttggacaagaagtaaagaataatcaagaagaaaaacgataccaagaaagcaacaggaatagacgtaatgaaacttcccacagcatcggcggcaggatgatacatagaataattcttgtgtttcatcaagattggtctgttagcaaacgatgcagaaacttctgctaaacccatcaacgaaacatacaaaaccccgaagaaaactacaccaccacgggaaaatgcaccactaacagtttcaggtgtgttgtaataaagtgaaccagcaaccaaaccttgtgagacaccagccccaatcaacgtcaccgtataagctttgtctccccagattctttggaaacctctgagagtagttaatcgtaattgctcgacaaaactgatggtaaatttggattgtggtctggcgtacttcatcttttcctggttgatcgattcgtagtacttagtttgggtttcgtcactattgacttcattgttgtagtcttcaatctcgtcaatcatcttcttgtactctggtgagttcaaccagtaacgttcgaagtcttcagctgtagaaggtaccttgtcttcatatcctggctttgcggttctacctaaaggatcggtgatagcagtcaagaactctgctgtagactgtctggcagggcattgccatcccatgttctcgaagtaagccttggcttccaagattggtccgaaatagacttgtcttcccttatacaaaacagtgactttgtcaaatgtttcgtaaatctgttcaccagcctggtaaatagttacaaatgctgtagttttcaacaaattagtggatgttctgatggctctggcgtactccaaggcagttgaggcatccaaacctctagtggcattatcccaacagtaaatggaacctctgcatgccaaggcttctgcgatagaaactctctttctttcaccaccagagacacctcttatgaaatcattaccgactttagtgtgataggtgtgtctcaatccgaatacagtagctaaaatttccttcatggcattgatgaactggccacgagaaactccgttaactctcatgttgggagttttacaagcaatagcaaacttcaaagtttgttccacagttaagtgagggaaatgaatatccaattccgggttatagatcaactcactcttgaagttcttcaacatcgtcttttggtctataccgtcgtacctgatgtctccttccacacctttaaacaagtcaaaatcggttccactcaaagccttcaagaatgatgaacaaccagctcctggtctacccaacactaaaatcatttcacccggcctggccaaaccattgagtttgttaagaatagttctgtcggggacctttcttttggccattgcagcctggattgcacctactggacctttggccaattcagacacagttgggacaacagcaaaggattcatctacaccaaaaacggacaagtctttgaaggaaatcccggactgtctcaatctgataccctggtttgaggcaagatagacgaagtttgccaaaatcttgtgcaagtcgaaatcgtgggggtcaatgacaatcttaccatctctggtagtgtgttgcgacaattgtctggataaagtttctaaacggtctaacacactctgggagttaagttcggtgacagttctgaccaattccaatcttctttgttcatcagtgggttcttcttctaacttttgaccttcgtagtgttggccatggaaaatatccacgacgtcatcgctcccagattcactggactggcgactagcttcttccttagaagacatacttgaaattagcaattcgcaatcagcaactgatatagaaacacgataatctcgtgagttggtgttgggaacgcaattatattgaactcaataaaaagaattctaaaaagtgctgttagccgtgtggttttttcaatgtgaaaatgtactaaaccgtgcttggttcttttcgccgtaaagtgaaaaagtcctttttagagtttattaacggaataggctagttgctacagacacaaaatagttgatagtatatatcaaaattaagatcagaatctggtcttgctttaaggcacgaattgcctgggttatatatactcagcggctaattgacataaagttacaatttatggctatattactagggcgaaaaacgtaccaaaaaaatatgtaaatattaatcaccttgctaaaaaatatgtgatgctgcagatacaaaacagttgagcggacaggttgctacctgaactggggttacggccgctagctccattgcacaaaacctcaagaaacgaatttatcttggatggtatggataggacggggtaccgtgagccacggccgaaagatagcactttggcttgggcttacggtgagcttcatcgccaaccacagctagagaaggctatggaaggaatgcatgtattgttccttattttgctttgactaaattgggccatctgatcagattcatatgctttaggaatgtgcggatgattggtgctaattctggttcatttgttaagcttagaaaggaaccattacccttactaccattgggcccggatccaggtccagaagagattagtcaactacactgtaaaatggctgaaatgtgcccacacattaataatcttttattaatggtagaacgcaaaagctcagagaaaaaagaattagatgcggtaagcctagtctgtgctttgtgttctgtgactggctcaatgttttgccgacacccggtagcagcttaagcctctggcccgatagtagacttcaccatagtcagaattgtctgaatctggaagatctgcaccagcttcagcttcgccacttcatgagatccaacggctccatcagcttcaccagaagcttttcatttatctggtcaacttattgcctcaaaattgacatggaaccgctgcacgtctaaattccaggatatgtgcgcgaagtaaaggtttattcgtctccaacaaaatacagcggagttagtcctggcgaatgacgctgggggggaacccttttagagtttttcgagctggaaccttctggatcagcacaaagtgttggatcccgagccggtacggccaccattgtaccgcatttaaagtttggtagcgttactccattttttgctcgcagcttcgcaactttgtcttcagatttccaattttcacagcggccagccccacttcagcatacaaattacatctcagtctcgtagcgcctactcgtgccttccccttcaatctcactatagcgttgcgagatccatttaccaagccaattgaaccaccagaggtgactcacgcacttatgaaattgccgctttctcggccgcaactcctcaatcagctcagcatgctgctctggaattttatccacagaatatacgacaattttctgaacaatcagggcgcggcttgcacaggctgcttgacagttagttatctccgcttaaactccgtattctgacgctgtagataaaaacactcaggggttttgtgctgcagctgggtgcaccatctttccagatgattcccacttagagtattattattattgtttttgttcgcacctctcttaaatgaagcccgtcttagcagtacagcagcttctgcaaccaaatgtagaaatgaatccgttcacagcatttgcggcaatagtggcagcgtatgtttatactcatatttaggttgcacagacagctccacaagctcagagtcaacataggtagaaataacagagttatatcaatcggtatgggactaacttgttggcatagtatttagtgtagagcgtcaaattccgcaattcccggccaacttgaacaagtagataacgagcctttcatagtattcaaaatatgtaactatgcaagatggtgaatcttagactgtgccgaaaattagaggagaaagaactgccatagcgattggagcaagatgaatagtaacaagcacatattcagaattgaaaaaagagccttgcgcttgaatttcgcagtcgacgaacggcccgtgaatggttgcatccgaagaaaccattcaagaaacaatcgcagttttctcaaaattcaaggacggtgacacgcttaaagtgtaatcgtgtacccaatgaatatccactttatagctcgaccaaacctccttgtgtgccccaatagcttttcagacatcctcttcagagttttgaatacaactcagacatcgccaaagctttacttacaattgctttgctgaaaatgttcaatgcttttagatagctctctcttttcttttccatctctccgtagaactttctttgaagtggctttcgcacaacttgctcttcaagttgcacacttaataggagaggtgtgaacttgctaataataccgtgcgtaaacacttcctggataaccttatcgtccgcgattcttgtcaccactacggaggtggggcagtatagaacttcttttgtcccacttactggatagagaatacggacatgtcggctggtgatctccgacgaggcacggagcgctaccatttctcctgcccggcagagtaatcataataataaaagtttgcgctgctgcaacttgccagatgggagacggttccaccaggaattatccgttccgaatacttgttaaatgatgcagtttagtacggccgtaagttttgtgtccccagcattgttgtagacttgcgtattgtacaagtggaaacggtgttggtatctcattgggaaacggcaccaaaggacagccttttatagttttatgacgtatgtggaaaagttcagaattctgtgaaaaagccttgataatatgaagcaagatatgcagttttcatatttgaataattttctccactattatactattattcataagtcttctgttacttcataattcgaacacctagttcaatcaaattgtcaaattgaccttctacgccgtgttgtgttacattttattgtataaatgttatacccgtataaaacaatttaacctaaacaaaccccattttaaaagatgcaaactattgttagacaaaaatagtagaataaatttcagcactagatatcaaatccagcggaataaataggtgaagtgatttgctttgtgtatgcaaacatggctattcgttggaatacttcctcttcaagtgtggtgacgaagttccgtcgacactatagccgtctgaatcaaatagtggactcttcctgagtccgtttctgctttcctcttcttcttcgtcttcatcttctacagcctggctgcttgaattgacttcgtcctcatcatcgtcatcgtcatcgtcatcgtcgtcgtcgtcgtcatcatcttcttcatcatcttcttcctcgtccatatcttcttcgttctgttcttcctcctgttcaatttcaataccgtcggcatttttagaggaattttcgtttttactctgaggcaagtaatgaatatgcttcgataacggatcgctgtttacggtgtgtctacccatcaattcgatcaactggatgtagtagagatctaagacgtccttcgcgtatctgatactgcagtattggtgttctttttcttgaccttgaccctgcaaatgctgttttcctggaatacacctccagtccacgcggttcaagaaatctaactctaaacaatttaattcgcctacagccacacctccaactttggcatagtggtcatttgtgtagaagaagtcttccatggacttttgcgacaacatagtagctacaagaagaaaacgatgtaccgtccacgagttcaacgtgaaaaatggctggtattggtgactcaacaagtcgatgtaatagatggttgtgagcaacgttgctgggttgaagttgttatactgactcaatcttgtcaagtatgtatgggtagaaatgctaggaggtgtacgcgaatggtatcttgtcaataagctgttcgtcgaagctgctgaagatggctttgggtgagatatcgactcgggcacagacttatcattcaacgatatgagggacagcaacattcgcgaaatcaagtttattaagtcgtccgtaggacagtccatgaactgtgggggaaggaatttcttgactacttggacttgaggcactggttctggaaattttctcttgggagaaggcagcaacgttttctcaagagtaatcataggggaaggtaacttcttcaaagtctgggttttctggttatgctcatggtgatggtgatgataattttgatatttttgagatatcaagggcgacgacttgatcctgattttgggtgggtcatttctctggatgtactgttggtatgtctgggcgttcttgtatgggttcttagtgtgtttgaacgtcaagtacttcaggtagatgtccatcagcttgattttccgttctctattgagcgcctggaaaaaaaggcggtggttggtgaaagtagaattaatggtaggtgacttgaggtactgggcaagaaatggatcaatgtgttgagtcaagggactactcttagtagaagaagatgaatatgaggatgatgaacaagacgatgaagaaggagatgaatgtgatgtcaaacttttgggaacggcaagtttacggtctgaacgatcagatggtgtacgtccagaagatgccaggcttgaagagggttgttggctctgcgactgggagccagacagattttgtgaatggccaccgatattggaagagccagcgtgtgaaatggtattggtggctaaacatgacgaatatgatatattattgctattggaactattaagtgtgatattgggagacgtgatcaaatggttcggactcatcgtgggagtcgtagctgtggacatagtcgtcatcttgggcgagaatttattgaaaagattctcgttgggagacggaaacggcgacaccgtgtctagtaagctcatagattaacggatgtgaaagtggtaggacggtcagttaaagatggtggaagcacaggagatgttggtatgggtttgcaaattttggtatctgtaggttcaattaatttatggatcgactgaagtgatgactgaaatcgcccgtctggagggaaaaaatgcaaatttactgagtgctatttgagtcacggcggacaggattcctcgaagatgccggcagaccagttgaagctgtacactatcagcagagtagagtataagtgacagtataaacttctaagtgtgaaagcgatcccacaaagaatctgcaatttagcaaaataaattatatatgtagtaaactggagtattaggagtaaacttccacggaatgagtttgtacacagttaaataataccaagactagaaaaagacaaaagattttttttgaaggggaagtaaattgccgctggcaaacataggcggttggcttagttaaatgtccatacaatcgctatagcctggtttgtcttggaccagaaggcgctggcagtataattatatttatacgaaacagatacaaacgtcgactagctccagaagaaatctatacggcggcaggtgtggagcacaaaaattaaaaatggtgggggttgccgtgaatatataggatttagagatgccataccagtacagcagcagctaaaattgcaaaattgaacgcaaaggtgaatgtataatgtaagtgaagaaacttgtaaatgacagcggctaaaaacgtgctaaagatgaagacaaatgagccgccagcggctaatgcgggaattgactttctacagcaggaaaaagctgactactcacatcaattcaatctattttgtattagcatactctctgtccagaggctctggagtctgtggactctgaaaactccatttgccttctctgttcagacggaatccgtcgagggtttgatggttcgttggatgtgcatatagaagcttgttatcgaaaaaagactcgttcgaagaaatccacgtggaccacgatgcctccatccccacgtggaatccacagttgcataactggactaattcttccctatttacgcaggggctggtcgagaaagtggtgtggacaaggttgtaagaggaaatgcttctgacagcgggtcactcagaatattattcgctggccccgtcataacttgagaaaagtgagctcgaaatataattagaaaaggaatttgaatacgtataaagagctccagagcaattttaagcaaattttcgctactgccatagaatatgcgccggtggttccacttccctatatcggaattctgccccaatttaaaatgctgttaccctgcagtcatacatccgtagtgcctttaactgctatcataatcttgtgtcgccgtcctatcttgatcacctgcaggcggctctaatttaagaagtacttatatgatgaggctccaatttatttagccgcccatttaacattgaacggcaacaaaagatgctcgattcatttatctgggttacctcaactgcagttgcaaaactgactccacaagctttccagatatagacattttctagtcaagcacagcaggaatggaaaaggcaacagattctcgctgattgaaaagattatggatatattctcatgcgatcgaaacaagatactatctttctgtctctggaagtcagtaattcggttatttaatccaatttcaaaaggctggtgccaattcgttggctaataagtaaacgtgttggaacttgagtctaagcaactcttcaccactttttgccttaaacaatatttttcaatgtaatctcgaaatctctgaaaagaatatatccatttgaaatcatgcagcgtctggcatacatacaagacgaactccagccccgtaaattgactcgtaaatttattgaagttgacgtacatatcctaaccgaaatagtaactagtctctaagtggactggcgtctatattgagatcgtctatttaaattgtagtggtgctgtcggcttatttcgaatcatcaagactcagtagaatactgaaatttccagtctctttccatgaggaatttgtcttggtaagacacttaaaaacgagtttgcacaagacatgaaatggaactcctgaaaatattgatatcagtttagaaaagcctggttgaagttcgtatttgcctttaggagtcccatgtggaagttattattcagtataataaccacatagttgatacgcacataaaaatacatgttatagtaatctttgatcttttagttagcagagccaagactatattggttcgcgtttctatttaaacttggttctttcagggaattcctaaaagaaaagctttgctggtgattcttcttcttctttctcttctttgttttctttatcttctctgactacatgcctttatatgaagcttctttctttgcatattgtagcgttcctatcttcgcttttccatcctccaccttttgagctcaaccacgtgaataatggggtctgcttctacgtggagaaaccccagactctcagattgtcgttagataggctggagggttcactcccattgatcatattcaatcacaaggaacttgacctcgtgacaaatttgcctgatatctttacatttgcagacgactacagccacgactataagaacattaaatatgtgaaggtatccaacgaaaaaactggggtatctacattttcgctaaacattgacaaactcaaaaaaccgaaatctgtctactacaactcccgagcggagttcccattagcatacaaacttattgaacccaatggaatatattgcatctacgtacctgtattaaacatgccttcgggcaggttgccaaacaatttccgagtccttgcttcgctcgaaacagggcatgcaatgattcaagaaagcttgtcgcatgtaaggttcaatcgtgaaaaggtactaatgttggttctttcggtgatccatgtgtttgaatctttccgctggaacaaggaaaaactctcccgagccaaagtctactacttgacctatttcgtgatgaacattgcaatcgctttgttgagtagattcctcctttcgggaatcggccctatttatatgattctatttgtggtggtgggcgttactcttggcagagtattcttcttcaatttcggattcttagattctaagaaaaagttgcaatattttgcactttggttggctgcctatctgctgctggtttacgtgttaacattccttgaaccatacacaaacacagtgatggatgttgaaggcgttacgttcaccaatcttgtaaacaatatcttgttgactggacatgataaccaaactatcagtgaactttactatcatgatgttttcttcccaatagcatatccggttggagctggtctcctattcgttgctatcttattattgtattcagagaggattctattgaaaaacgagaaaagaaagacggctatagtcttccagaggcagttggcatcactggtattgctctatgctgtgtggttcactatgtttgtagccatttactactacgtgttttactttgagcggatatacccacgcaatgtgctgacaatatttgaaatttttgacagcgacaatgtagaccactttaatcgggtcaaagaaatcacaatgcacttagtagctaacgacttgatgatatggcaactgtccaaatatgctttggtgaaaggagatcagcattattctatggacgaggagtcggctatggctttcgcagacgacaaacgatcaacgtagaactcatagtatagtagagtactatctatcatacgtatagaataacgacaataaacaaatatagaaattaaaaaagggcattggaaaagcttagaactactttttaattccgtatgtacagagaaatacaacacatacattgggcgtttttgttcctcacataattgttatagtcgcatggttgcaagttgcaaattcggcgcctaaatgcacctgggtttttctcttgcatattcaaattagaaagagacgccatgccaaagtttaaattacagatgtatccatctgctcatatataatttctttcactgtcacatgtatttttgcttgccttttgccacctacatttacatgacccaaggaccgcctgagcatttcgttttcaattttcgatttggctgacttgttttttgcgcacttttttaccaacaaaattgccagccacaaaacgctggggtaaacatcacggaaaaataaaaacataaacattaacaaatgtgtccagttcttcttttgcaagcttagaattaccaccaacaatggaggacgaagagtatctcgaagaaggttagtgatttcaatacaaatacgtgttggcacgcaacaattttgcggatttctgagtttttcactcataagaggaaccacacatacattttcaaatagtactaacattatccaggattcgatccgaaaactttaaaagtagcccaattgaaggaaattttgaacgacaaaaatgtcagtattccttccaacgtcaaaaaggcccaattagtagagttgttcaaccgtgaagtcaaactggctactcctgatgctgccgaagcaagcaagaagtttgagtcagcagagactaaatctgaagattcagaggaaaagcacaagaagaaaaagacatcgaggaaagcaaaagtagcaaaggaatcggaattagaagtgacagaaaactcaggaaaagaatcaatcaattcagacagtaaagctgaaggtggagctgtcccagatgtcaagactccttccaaaattactccatccaaaaagactccatctaaatcgatcaaagcggaatcaccggctctggaagcgtctgtgaagagtccttcttcagcaaagaagagaaagagcgagggtcctacatcgaaagaaaagaggaccaaggctgacgagtcgttaacaaatgagaaatctccgaagactatcaagaaaccaaaagcgaagagcccatcggtcagaagtcctaggagccctaaacttgaacagcataaggctccgctctctccccttaagaagacaaagccaaaatcgatattcgacgaagatgatgacgatgagcttcttggactagtacctaagtctgtcaagacacctgtgaagtcagaaaaaccgaatacacctatcaaatctactcaaaaaactgtttcatctgcatctatcaaaaaggaatctgcttccaagataaagaagacgactccgaagtctccgactacaccatctataaggaccgcagtcaagtcagcaactacttcaaccagaaagaagtcgcctaaagctgcatcaatagttaactctccaactggttccaaagacgtcactaataactctttcaggactgttgaagaagaagtacaaaacttcgaccaagaattgcaaagaataaagaacaaggaaactgcttctatagacatggcattggcttcagaattgggtattgctgttcaaggcttagctcctgtaattgctactccaagaatcgagtcttcatctacttctaaaaagagcccagaaagtcatcaccatattctcacacctaagccaaggcttgtccctatcaatcaacagatcaacgagttgattgaagaacaagacgatgttgaggaagaagatgatgaagaaatcaaagttgaaattgacgcacacggtgaagaagaagaagaagttgaacttgagtcacatcctgaacaggtaaaagtgaaccgccctttgactcctgtcctttttacattcttcacatggattgttattgtctctgccggtttgtttggttactggtacagagaacagacatttttgagtggttactgtggtcaagagattgacaagccgacatttccttatgctgacaacgtcatcttgaaaactattggaaactatttggatgcaaacttcaagccagaatgtgttccatgtccttcccatgcaagatgcttcccttaccttgaattaggatgttttgaagacttcattgaattcaaaccttgggacaacttcttaaagccgtacaataagaaatgtattcccgattccaagaaggcagaaaagttggaaatcatgatcgacgtagcgttggacttattaagaagcaagaatgctaatgttcaatgtggccagtcgaccaataacgaagaagctggaattgaattgggcgacttgcacgatttattgttatctatgaaagctccctacatcactattgaagaatttgaagaattgtggcagagatctattattgagttggaaaaggaacccgaagtaattgtaaggcaagtttaattttgagaatcagaaattgggattgaatacaaaagacagtattcagtttacaatcagttgatccactaataagacaaacatactaactaagattttagaagggatattcaagtgtaccactcccggaattcgttgctaactctaaccacactgacgaagaccagaacacgaacaaggttcttcgatcagcgtccttatcgaaccttagcttaaaatgtcagatccaaaacagtgtagtgggctcgttggttaagtacaagtatcggattatagtatttgtggcaatcttcttggtagttaagtatgttcaataccgttatcaagttcataggactgaaaaattgaaggtagatatcatctacaaggaagtaatccacaaacttcagcaccaagctaagctatcatcccaagttcgtgggaagatcaatgcgtatataggagccaaccaacttcgtgatttgattctagccaacgagcacaacttgaagcgcagaatcaacctttggcaacaagtggtaggcaaggttgatcaaaacaccaacattacctctcaactaattgaggatcatggtgaaatcatgaacgtctggcagtggatcagtgaactctagtatatatgttgaattgtataaagtaaatagataatagcatgtatattttaataatagattttcaattatcatttatcaatcattaaatagtttatcaagacagaatatttcagattgagacattggaatagtggtcagcataccaacacccctacaattaattcaacagtctctgcttctacaagttagaacaagttagaaatctattaatgcgaaacctaaattaattactggaatgatatgccaaaatatttggataaccccaacagagatatcccaacggtttggcgatatagcatacaccttctgtctcgataccatcgtaaccttcagatctatcccaggaagtaccgatgatgtagttggtagggaatacgacgccctgtttgtagatgacagatttggcaaacaagactgctccaccgacggagtccaagggtacagcatattcgaattcatgtagatgctgttctctttcattgttcttgttgtctacatagttttggaaatggtacatttttcctggaacatcacgaggaacgtaatcccattgttcccatctatcatcatccatcttttcgagctgattttcgtctggctttgtacgttgtcctctccaggaatttttatcataatcttggttgccatcacgaatgatacggggaacaataatgtctttcttggagttgataaatgtggatatgactttatcggaatggtccaacttgatgatatcagcatcaagaaacaaggtgtactgttcttggtgtaaagcagtgtatagaacgaaattacgggctctggcaattaaacgacggcgcaagcgttgaacattgtcgttgtgtctttgatctctggaaaatcctgagttttcctcaaggaacggagccagcaaaagtgtaacttttcgaagtgctggattctcgtagatagaagagttcgtgttgaaaattgtctcaaccttactgaattcggatgcactgttaatgaggaaagcaagcgagatgtcgtgtgtgtcatgttgatacaaggtggagatggtatcgaaaaagtctacaaaggttcttccttccccgtagcctgagttcagtgcaatggtcagtacaatgagaactgtaggtctagttttgcggtcatcaaaaggagaattcttgacaggaatattaccattgcttctttggttattcagcacatattcgaccttggtgtagttgaattcttcgtcaacgaatatgtttttgacgtatggttctttaattgtggatttgtgtgttgctaaagaagctgtaaagttcgcgaatttttggtggtggctgtgagaggtaaacacaaggaagagaatgagtagcaaggggacaaccaagtatcgcttaccgtatttgccacgcatcttatggggctatatagtgaaaagtaagctgtggaaaagaagtcaaataaaatcaaataaaatcgagaaaagttcttaatatagacttgtgtgaggagaattggtcttagattcttgctatataataatatgccaaaaatatcttccgcgcccaggaacacaaagcagtacaaataattcaagaagtagaaagttgtaattagacgcccaattgaagagcagatggctcgctacttaaactattttttatagtatttgggttgataaatgtacccatgtgtatctcgcttgatgctccaaacgcgctcacgacatcttatattgagctcccgtaacaatgacattgacttttgctcgtcccgttaccatcatcacatttaccaagtaccttgtatacgcttagcactattcctcaatttcggaaaatagtctcttcaagtaccgactggaatatgtggcacttattattattcagtttggaaacaaagaattttcaggaagcagtccctcttacaggctccatgaaccaaaaacgcagtttgtcacagttcacacattcgggctcctgcgatcgtagaagcgtaaatgcacagagcttgtgaattggtaaacgtccattgaactcgttcttgttcacaattctagctacagactacaaccaaagacttgctttgctgaaatgcttggttcttacatttacatagttcacgtagcaggcgactttagcaagtattatgcgactggtggaaatattgttcccctttcagaacctcaaattcagaggctcaagagtggcaaaagaattatgtcaaaagtctattttattttttcaagacaattgctaaccaagaaatgtttaaatttagtcagtcggcaaggggcccaaaagatagagtcttcaattgagaagagagcgactggccagatgtagttgaaaccgtaacgtctacttaagacccatctcatggctcccaacccagcctaagacactatttttcccattcatatggaagaaattctccgacggtgatatcttgtgagttcaccaaccataattgaatatttcacttaacatggccacgtttcttccaccgtggcactcttatgcagattcatatttgagaccatgtaggcttatcaatgaagcgcgataagaggctgttgtgacagtaccatcgatgacgcggcactgatgacgtgctattctaaatcaagtaaaaagaagatccaaaccagtaagagccagagaccctgctgcattggtagcggttggcttcgttttaatttggtcttcgaagaacctttgtatttttttcactaactatactccaaatgtaatgaacactacccttttgtttcttagattaccagactgttagtgctcatatcaaagttataacgtatattttaacctttgcagacttcacaaattaatatcttcttgaagaaagccctgataaacatcaatcgacttgatgttcccctttcctctgtccatcgtaattccatgatattctagtatttttgcaattcctttaaaaaatacagatagataaaaaatataagtatttgtaatttatttgatcttatcgcccaagcaactggaaagcaacttgctttgggaatgagcctttaattgcgaatactcctcagggattattgtagcaggatttagaacttgatagtacccatcttatcaatttttacaaggagggcccccaggagaagaatacgaataccacagaatattgttatttttaattagggcagcatatatacaattttcacatcgtccgtctcctgattacacatatatcttttattttctaagagctacgatcttcgtccatttttacttgaaaggtttcctcatcaagacctgatttagattgatcagagataatccctaccatttcgcgattttgtagctcaaaagtccgatatcctgcctctttggtttcgtattatgtaatctatctgagcaggttctccagatttgtactgtgcataatggcttgatagttctgttattctagaatttcatatagtaactgctacttttgcaagtatttcgtatatattataaagtcaccgtaacatgacttccttcctcgacctagacgatgatatcttggtctgtatacttcctcaattcttatcccctcacgatattttcaatgtctcaatattgaataaatcaatatataatttgaactacaactcgtcgctttcatccaagcttttccaacaattgtacaacaagatcttcaccaacaatgacaacaacttcaaactctcgtatagtgacaagctcaattggaaacaattgttccagttgcgctgctcgctgaaacagcaagtctatacttggggatcatcgcagtttggtagattaggataccttgtagataagattgaccagaaccatgtaacttcaagaagtctcggattccgaggtgtccataccccgactgctataccacaatccgcaggtcacattgtcactgatattgttgccagtggatttcagttcattgtgctttcgtctagaagccaattggttaccacgggattctccgatgcacctgcaattctgcgcgagtcaactccaggtcccataggaagcaaagattaccaggggaatttgatggcgctgaatctggctgctgttcccttcacagaagtcgtgggctctcgtagaagtatcagaagacctggcgtcatgccaatgccggccaatcgttatgaccatgatgtcatagagactcagccggccagaaccccaagggatacacccatgaatccaaatttgacaagaccaccagatcaattgacatttccgcctgaattgggctacaataacgaagataatgagacatctaaaaagattgttgattctaattttttgacgactataactttccctaattacgagcccgacgcctatcccatttcgatttcctgtggaagacagcactacatagttctcgatagccacaacagaatagcttcatgggatacagggtgtaggtccaatgcagcagtcttgcttcggttcccaggcattgatccgagtttgcccatattgaagatctgcgctggttggaatctttcctgttgctacatctacgacgttggtttggtgatgtggtatactcgtaatgcgataacgaaagaacagtatgaggctggtgatcgcaatgtagatgcacactatgtagtgattccgtacaccaagcgggatgtcgtagacttcacagtgggctcggactttgtgctctttatcaagaaatcagatgggaaattgtacaagtttggtatgaatgcgcaagaactagctacaagagataggcaaattggagtcagaccagacgagacacaagaggcaatagaacctgtccccagctttaacaactggctagcccggaccaatttgcagaacggctcctcagcggagtttactcgcctcaattgctgctatacgaattttgtggtattcaccaacgacgacgacgtgcttattggtggtcgtagccatctcgaagatagctcggaggaatcggagagccctccgaaaattattcccgagctccagaaacagaacatcaaatcagtcgaaatcggcgactaccatttcctagcactaactacagatggcaatatacttagctggggcctagagtccagcaattgtggctgtttaggattgggcgccaaagaggagtttgtccagaataacggtcccagtgttgtcaaagacttgggccccaataagggcatggaagtgttggtacctacccgtgtcaagaatccaccaattccgggcaagtgggtctctattgcagccagtggctggcactctgccggagtttatgttgcagagtaaggagaaatatataggctcagcgtgcattggggcaaatataatagacggtcgtgaaggctgagtaattatataatatatttagttaaatttagccagattatataaagaaatatataagtagtctatagaagacgagcgaagagcttgaagatcagagcaaataattgatttacactgtacaaaataccgaaacacaaacaactactcttgagcacaggctaggcagttgctatatacattaattatatacgaggatacaaccctgaactgcaccgtataagcatttatacgatgtatacagagagtatctaattttaagcgatagagtcacttctttgccctgcgctaccacctcgttcacaccagatccaggcagaaaaaacaaaaaactggatacagaaaatttgaacggcgttaatgaaaacaacttcttttcgccagtctaaactcaacacatcgtcgtcttccacgagcttgcaagcgcattcaagtcgttgttgttcgaaatttgtcacgtgtaagcccgttagttactcgttctgaaggagagcttcccctagtgaatcttgaatcatcgtcagaaggcctccatccaactcaactgttcatttaattgaaagaccagcgctgggaatatcaatcatcttcaattctgaacgtaatctcagtagcagtacattccacattcaagcttgcagtagttattgtttgtttgttgcgataagagtcatcccttttttgatacagctggatcatagttctagactcaaactgccagaaccagatttgaattcgtttcaattatactttaatatttaacgactacattctgcttctatcattatcaacgaactcattaatcgttgaaacacacttgtttttcttgaattgattattaaactgcagactaattctgaagtatctgtcgtgttcgtaaatcgtaattgcatatgtctgtctcatctgaaaacgaccatttgtcgccgctcgacctcagtcctagacagagaccccattccaacagcatcaatagcattggatctccgggtcgcaatagaagcaactcaggtacctttagctcgggtcatataaataacagcattccgcttactccgacagggtcgcatcatcaacacaccgttaataccagacccagacggtcgtcctccatcattcagcacttggagccagacactttggacacgaaaatcgaccaggcacttaatcccaatgtcaatgcgaactgggtgcaccaaaaaggtgcttggatcatccacatcgttctcattgtgtttttgaagttgttcttcaacttcatcaccgtattggacaacgactggagatggactttgaccaacttgacgtacaacatcggttcgtatattatgtttcatcaagttaaagggactccgtttgagttcaactcgggagcttacgataacttgactatgtgggaacaaatagacaatggagaccagtacacgccaacgaagaaattcttgatgtcggtgcctattggtctctttttgatcagtacccactactcaaactacaacttgaacttatttgtattgaacggagtcagctgtctctgtgtggtggttcccaagttggccattgcccatagattgagagtgacgttgtactagtccaagggcaagcgaagatttgagtaccgtttgttttactgttttactctgcggaggactttctaatacatccatatatatttgaagaggctaccggcttatgattcgagattatacattaatatacataaaagagagagaatgtagatattgtagagataactacagaattcagtggattatttgtaaaacctataggagatgccatgtaagagctttctggattagcgttaccgtgcagcttataggctctacacaaaagcttatacaaattaatcgtcggagtgtctctggtccgactaattctgcctgattcaatcagccgagtcagcagtacagacatgggtactacgtctagctttgactctgtgcgataaagatagagatggagagaatgcatagagacggttggcagaaaacagttaagaaaatagaagaataaccaaatatatagagagaaacttgagtaggattatgagaaatttctgaagaattgttgtaatctcatgaacaagtaaatacctatatagacagttcattatggcagagaagaccactttatttgtcctttttatggcatttttcaaatcagcttggtgctccactaataggttccataattccccatactatgcgcattttttttttgactccggcccgtattgcaattaaatctttttccccatcccgttgactcaagcgcatcgtgttgtataaaagggagagaatgtcgaggtggatttttcacttttcgcagagcctttgcttgacaatctgaaacccaccagttcaattcctccccgaaatctctctcccgcaatgccttacgccctctctgaatcgcacaagcaattggtctcgggccatttagccgaaaccgacccggaagtcgaccaaatcatcaaggatgaaatcgacagacaaagacactccatcgtgctcattgcttctgaaaacttcaccaccaccgccgttttcgacgccttgggaacgcccatgtgtaacaagtactccgaaggttaccctggtgccagatactacggtggtaacgaacacatcgacagaatcgagctcttgtgtcaggaaagagccttgaaggccttcaacgtcactgctgacaagtggggtgtcaatgttcagaccctttctggttctccagccaacttgcaagtctaccaggctatcatgaagccccacgaaagattgatgggtttggacttgcctcacggtggtcatttgtcccacggctaccaaaccgactccagaaagatctcggctgtttctacttattttgaaaccatgccatacagagttgatttggcaactggtttgatcgactacgacatgttggaaaagactgctgtcttgttcagaccaaaggttttggttgctggtacatctgcttactgtagattgatagactacaagagaatgagagaaatcgccgacaaggtcggtgcctaccttgttgtcgacatggcccacatctctggtttggtcgctgctggagtaattccatctcctttcgaatatgctgacatcgtcaccaccaccacccacaagtcgttgagaggcccaagaggtgccatgatcttcttcagaagaggtgtcagatctgtcaaccctaagactggtcaagaaatcttgtacgacttggaaaacccaatcaacttctcggttttccctggccaccaaggtggtccacacaaccacaccatcactgctttagctactgccttgaagcaagctgctactcctgagttcagagagtaccaggaacaggtattgaagaacgccaaggtgttggaaactgaattccttgctaagggataccagttggtttcccacggtaccgactcgcacatggtgttggtttccttgaaggataagaacatcgacggtgccagagttgaaaccgtctgtgaaaagatcaacattgccttgaacaagaactccattccaggcgacaaatctgccttagttccaggtggtgtaagaatcggtgctcctgccatgaccaccagaggcttgggtgaagaagacttcaagaagatcgtcacctacattgactttgccgtcaactacgccaaggagcttcaagcttcgttgccaaaggaagccaacaaattgaaggacttcaagagcgccgtgttgaacggtgacgacgaaaagttgaaggctgtaaaggccgaaatctcgcaatgggctggcgaattcccattgtctgtttaagtttttaacaaacgacccaattatgataaaatcacgtataaatttcttgaaaaaatgactacgaaacttgtatagcttcatttctatgttatggcttatggcaagcaaaacattccatactacttgaattcaacattcttaatgaacttgatgtagtttttatgactatggtattcaacatctacatatacatacataatattaattctacttatacatatactaattactgcagaacgtgaattttgttaatatcaaagcatagcatgtcaacgtccagcttacgttgatatctatgaagaactctactagcttctttcatctaaaatattatcttaaatattctcgatatgttcccatatatatttactttcattgctaatacactagattaacttggcatccttgaatgcttgctccaacttaccttccttttccaatctcttcaagtcttcttcattaccccaacgctttccgttgaagaaaattgtaggaacccactttctgccggaaatctgagtgaaggcagcctctaatttggtagcttcctcctcgtcagcaaacttgtccaattcgatgatatgaaccttgtccctcacattgtactggtcccacactctgtaggtgtagtgacagtcggggcaccaggacttggacaactggagaaaagggtgggtgctgattaattcctgggctttatcaagatattcctgcgaggccattttacgagaatgtatttattgcgatgggatcaacaaagatctaaagaaagaagaagagtatatccattcaaaaaaagaagtcaagctgtcgttggaattactactgaagatgcgaaaaatcgtcttttgtggtgtcaaactgtggatccaaagctggtcctgttcacaaagacaattcgtttctactatgggtggtagcagcttcacaaatttaagactctgtataaaataataggtgcaatcaactgtaattctctaggtactcatgctccggcaactgatagacaagtcataaatatatattttcagtaaatacaaatggctaatggaattcttaaaaagtagttatggggttgatataaaatctgtattagtgtattattatgtctagctatattttataattatctaggctgctttaggtttttctgggtagtcttcaccaatttcaccagcattggcgtcattgttgttcaatacaccctcgttaccaatgctagagctgctggatgcgttttctttggtttcaaatgcttccttgtcgaatgtaccatcgtcaaacaagcccaatctgttggcttcgtcttcaatttcgtggttggacaactttggcatggttgcagcaactctccatggctgtcttttgtcaacgaatgccttcgcaaagatgatatcgatttcttccaacgatcttccagctgtttctgggtagaagaagaaaataataggaacgaaaaggaagttcatcacagcaaagaaaagataggctccccatctggtgttagtgacaaagacaggggtgaacataacaacagcaaagttacagatccagttggtacaagtggaaattgcagaagctatagttctagttctcaaaggattgatttctggtgggtatacccatggcaatggcaagatggtgaaggcgaagaaacaaataaacaagaataaaccaactgcggcacccttggcgttgttttcagtatcgtcaatcaaacaggcaaaggtgatagtgaatgcaataccttgtcccatagcaccaatcaagaacaagtttctacgtccaagagtatcgaccaagaagaaggaaggaattgtgaaaatggcgtagacagttgcgaaaacaccaccgataatcaatgccattcttctttctaaaccaatagtgtcttgaaacaagacagtggaatagtaaatggcagcgttacaaccagtgaactgctgaaagaattgggtgctggatccaataaccattctttgccagtgctgggtcttaccaccagtaaacacttccttgacggaagcatgtccagcaaacttgtctacactttcctgaataacttcagcttcattaagaatttcttcgtcgtcttcgggcaagtctttcaaagcagacaacacttgaagagcctctgctcttctgtggttagcaaccaaccatcttggagagtcgggcaattgcaacattcccacaaataaaacggaagcaaacactatttggaaagcaactggaaatctccaggaaactgaattgtcgacataagacaaaccgaaatccaaccagtaggcaatacatgtacccacagcgacaacggaaccttccaagttgaccaatcttcctctgttttcagctcttgacatttccgattgccaaactggaatggtggcagtattcataccattaccaataccagtgataactctaccaataacaaactgacctaatgaccagtgtggatggaaggcggttacagaaataactgttcccaagatgataataagcgagccacaaagcacaagaggtcttcttccaattctttcacctcttaacaaggcaaacacagcaccaaagaaacaaccaagctcgtaacaggaggtgacggcaccttggatagtactgttatttctagtggcgggaaactcagagttgaattgatcagcagtaataattccggacatcaacccttgatcatatccgaataatgagaaaccagtgacagccactacagtgatgaaggctctcaacttcttgcccctcaacccgaaagtgttggttctagctgttaaccaatcaagatatgccataatgtatcaactatggtgttattattaatatggaaagttaaatatggtaagggagttgagaattgcaatacttctttttgagaagatataaattcacagccaaaagcgtatagcgcaaataaaaaaggaaactacaaaatggaagtacgtcatagccctgatatttatacctactcgtctgacacgaacagcttggaaaatcttttattaacctgaccacatccccataaaaattgtcaaactcgaccgagcctagccttactacttgaagtgctgctgttgtacttgctatattgggaagaatttattctggtgcaggatgacgtaaccaaggacgtgttttgaaggatgtgtgcatatagttattccgggttacaaattggtttagtcagtaccatttctacaaacctttaacagtcggctcaggacattttgcttgtctaaacgaaagcctaaacatgaatcattggttatcccccacccggtttttcaaacttggtcgatctcccctcatttcccctacagaagcctccatgcaatagagccaccagaagaccctaatcctgcgaaaaaagttccgtttcagtagtgcacggcaggaccccgttaaattgaaaaatttgtttagtttcaatttcatatgggcgcaaatccttgtgcaaccatattaaccgagcttaccagctgcaaacgccgaacagatgtcttgatgagaaaaaaacgcctgaaaaaaatccctgttagtatgtgagagctggtaatgttgctttgctggtcagaatttatttttacgtttctttatatatttgtttgttagaaagaatctgcttgtttaaaacttgctttccttcggatagcacatacacactctattgttctagtctactcggatgcaaatgaaataagaggtttcgcaatgcgtagtttgtgttcataaccatcacaatcaaggtcgtttctttttatctcttttggtttgaatttcggtctaatctatgaaactctacttttgtagatatagatacacgtttgtgattatcgtttttacgtcatagcagatacaaaacgactggaagatctgcctaaagctacatccatcttatcccatcactggaggtggacccgttagttagtagtctcgctatttttgaatattgaagctatctatctttcctgcctcgttatcttcgtttcccactatttcttctccgctcttttccacgggtgcaacaaattactagcagattgggttcgattctcggtaatcctgtctctatgattataccaccagttccaagcaaattagtcatttgaactacagcaaaaagtggggcattcctcaaagcggaacgggtgcaacataggataatatgccaaattttaaataagaaaaatcccgtcccaccaagaaaataaattttttataacctactcaactaatacataataaaattttggcagcacaaattactaataaatccggaatatatttctaatctaaacgaaactatgtagcagctctttcgatatttctatacatgtccaacaaactaaaataatgtcccactacccccaacacgacacagatatgccagatattatgacttgccaaaaagtagtcgacccaccacaacgaaaggaactcatgactgtagggagtagtggttggcttctcgggaaaatgtttggctataatatctttgaatctggcctcttcttcgtcctctggtaaatgcttttcctcgatattctcaaactcctcttcaatttcttcgatttcttcacgaccactattttcgatattgtccaataagacgtctctggtgtcatagttgtggtggcatactttagtgttctcttcaatgatcacatcatatctccatctttctggaattagacctccgtagaaaataacccccaaccagtaccacacaaaactcttgtagacaagaggaaagaagaacttgagtgtggggagaacgccttcgtatatcgccatacaaacaccggcagatgcacccaaaaatgctaaccccatgaagaagccgattctcacggatctacattcgggcttatcgaagtaaggcgaccaattaaatgcgaacccggaggtaccacaaatcgtggaaaacgttatatacacctttaggatcttggggtaattgaacaatgcacagtattctgcagctataacggaacaagtaatcaacacagtgattccagtatagtctacacatgcacacatttgtctggtaggcaagtgggcaaaacaggaatacgtatgccatgtcacagaactgataagacacttcaaggccgctccaaaaaagacgaagacgggcaagttgtcattgaacgagttcagcttgtaaacatcggtattagggaagtgccagagagttaaatatcccacaaaaaagaatcctatgatatgggtccatatgttcatagattcgttgtggttgaattcaaagatcgactttagcatggtgctgtggttcaacgagtaccgataaccatatactatgtacttgttttctctccaacttagaggcaactcgtagtagtgcaagtatctgtctttggcattcttcaaagctctattgaagttaaaaaatcgtaactgaagaagtgtggagtcttcttcgtagtcgagtcttctttctggcttgttgtcgttgatgaaggcatcgatcagtagcaatttttcatcgaaatactggatggtggctatgattttttgagacaagatctcctttctgttgcttgaactagctattaattctttgtctacggaacttgcagaatcactatcttcagaagatgtgctgttgaataaatagttatactggtcatcaagcgtattgtacaagtactccaagttggtgaaagaagatcgcaatacggagtccttgatgagatgaagtctctggtgaatgaggttcaaattgttgatggagtagttcttgatgttggacaagctagctgtgctatctcgtcttgaacgagagacattttccgcaaaagttgacaagttgagctctttagcttctttgagttcttgggacttgaatttgaaaaagtgctcaaagttgtctaaacgagactcgatagacgataagaaaacgtctaatttttcaaccaaaagctcttcagttgtaggaacagactcgaaagacttgtcattggaagatgttcctctgtgtctgatttcagtttccatggctgttgattgaagaatgaatggcttcgacctggacaagacagtcgaggtcagtagagaacgagaaaagctctagcagaacgtgggacttaaaaaagtgtgtatctatagcgttactatagtatttctaattagtttagaacttgaatggagttctaacaaactgaagctattctatgatttcggtcgtcagtagcacattgaactttccaattcagaagaatcaaaaatattggcaaaggaaaaagcaattgtgcgacattaggcatttgatatttgcaatcgcttggccggtgagacattttctagcggaaaaaaagacaaatacgacactccccctttttttagctggggtgaattaaatcaaaaagcctctctgcagttggctgaaagctgggaagcgcctgtgatatacaaagatttcgtgaatatacgtggacagtacgtatttggatcgtgctgtgaactgctagaagtaaaagagaagaaatatctatgtctactctctttcaattcattcaccgatatctacgctttctcttactggaaacaattaatatattaaattatgtctataagcagctgtagttgctgaatgcgaaaaaagttgtccattataaattagtgttgtttagttcagaattcttgcttgtcttctaggcttctctatgttttcaaagtcatacaagcactttctgagcggtttgggtgcaatcttgaatgtagatgtgagctcgttgtaaatttccttgaagtgtggtgtctgtgccaggaagttggtatcattacctgttctgtcaaaaaggaatatactctcaagggtatgggtatctgtgtgtttcttagtgaggtagtattccacaagaacatcagtgacttcaagcaagctaagagcgtcttcttctgtcatgttctgaacaaaattagtgaccttttctttgtcaaccttttcaatgtcatcctctttgtagaagttagtcttcgaaaacgtgtctattatatatgtttcttgtatccacaagttcaacacgcttacaaagtaccaaccaccgtattcataacgagataaacctttggaatactcgaactttaatctgttggttatggtagatggaatgtacactgggacaccacccatcatagagtaacgtaaaggagacaattgatccaacttgtaaaaatgcttacggcgatcgttgtagatttctgctttgtcgtctccatcttgcttcgaaatttcagtcaattcgaacttttcctttttgctatactcttccggcaaattggcatctgacttactgagaccggtgatgtcaatataaataccggagtcgacgtcgacgaatctggcatcaatatggttatgacctgaaatccctctgtgatgcatatagctgccaacatcaattaagaatctaccgtagccatcttctgggttttcaacaactaaggtctggttgaagtcacgagctaaacgaacaagatctgccattggcatttgaatatcgatatcaacgtcaaatggaaacatcaacccattccaataccatgacaacaatggaccatgcattatccaagaaatgatacctttctcttcggcaaaagtgttccatgtcctcaacaatctttccaatatgatatttgttctaatattcttgtcttgttgagtccaaccttctctatggtaattcaaagctccgttgaagaacctccagtcgtagtgccaaccccattcgtggtcaagattgtctggatcttggttgtcgatgactggcattccgaaatagactggctcagaagtatcgttgtattgagcacattcaatcaacccagaaaggtacagtttttccaggtgtgaaagctcgggtttatttatcaatgcttctgcttgcagttcgatgctttcaaaattgaatgatttggcttctaagtgaaactctctggatgctctgggattggattgcttcttgagtgtgtggtacattttgtaacccttatcttctggctgtaaatgaaggggagtgacggcttccttcaacttgttcaactcatcgatgtggttcaacttgataacgaagtcttcgtctacttcttcaatattgatattgttgctgactaagtaattgtctatcatttgtgagctagccaatctctgattagagttcaagtctacatcaaattcgtaggtaccaccttttttgtctccatttaagattatcacacgataaggttttggcaaatgtgtgagagcatgcgctttagcttggaaaactcggaggttgttgacagaacggtcttcgtgtctggcatgtgcattgattatggctcctggtaattgttctttatacttaaatcccaatgccttgagttcagactctggaaaatcattgttttcgatacagaaatatgggtctggctggttgttggtgttttccatcaaccattcacagctaatcctttcatcaataggtttgaccaactctttgttcaacgaagtcaagtccatccagtctgcccagttgaaaggtaaaatgggagtgttcagatacagattggcatcgaccactcttgatcccgcgtcttttgttcttaaatattgtgttctaagttcgtttaaatacatggaaagtgtgaatcttggatcgtagtatagttccttcttgctagcccaggagtcgtcattttcgtatttggcaaggaagggtctgataggaacatcgatttggacttccgtgagtgctgtgttagatacccagtattggtctgggttcttctcgacctctttgaacaagacttctactgacttctcgaaggacttcagtcttctagggtagttgaatgatggttcttgtgatatgacgaatgctggaattctattttcggttactctattgaatgcaaagtacatcatgttgacgatcaacaacgacataagaaagagcttccctgtccgggacacgagtttgttgaccacgaaattctttattttgatcatggcaagatgtgtgagattatgataaatgaacaagacaaatattgaaagcgatgatgaatgtttggactaggcgattacgtggaaaatgaatataaaaaaaggatgcagaaatgatgggagtacctgaggaggaagaaaatcgtttaattaataaagaaaacattcatccgtctcttgaaagagctgagcggttaaaaatataacaactattttttctttaccaagaaaaattattgatgatattatcgtaattttctgaataaggtttgagcatacagctaacacaaacaaaatttataaaaagaatatgcccctacagcagattactacacaatgctacacaatgctacacagtaattataccatttatatttggcgtcctacaaggttgctaactttgtaactgcgatcttggtgtctgttgctcataaatttttctactggaaaatagggcgccccatcggtacacgaaaatgtgcagttgcttttttcctgtgttttgagacgcaaatatcagccagctgggaagaaatctattggttagctgtacaaaaatgccagccacacaactttgcaaagctctgctcgagtcaatcagatgctgctggggcggacgactaatcagccctgatcgaacttagctagattgtgttcctttagacaatggcctctccttcctggttttgagccctcaggttttactgtgggtctggtagaattttcttcacgagctgcaggttgccctgtagattgatcacacgaccttaatctataccggatcctgtgaacattcacgcgacttctttcctataccaggtctgattaaagttcatctctatgggccagaagagattcccccacagtgacagaacgcgctaaacttggagccattaaaggtttcggagccgcttccactgcgtagagttttctctggttttctccttctctcagcgcgtacaagtcttccgtgggcgcaactgttcatgcgcatgttgtcgacgataatttccacagataagtgatatttttccaaaaaaattcatcctccgttatcgctaattccgcccatgacaaacttgcaggatcctagactaaaacggcattagcgcagcctgaatcgtcgatctcagactcacagtgcacacctcagcagagcagctctttgcccctagtctagccgacaccaattgctacagtcaagatggccgttgaaaaatagtcctgggcgctttcggtacaagtaaaccgttttgaagccgttggcaagtccggaggtgaacacgaaaacggagagccagataagacatctgtacaaaagtacgcaatgtagaatttattcagaataattatattattttcacttgtttatgggtccaatagccatgtttgactttccatactacagctgcataactccttgctctatttcagctctatttccagtatcccacgccactataatctcgattctaaacctacaatagcttaccatacattcctgtatgtcgactcattttacgcgtgactttttgcaggtgattcgtgggccgatatgtaatcttgaaatgttgaacctaaacatcctgaaacgacatccaaaagaccaactacagctggctgggaatatgagtgcggatggggacttcgatattgaccatcgcgacatatttcagaacttggatgttagccttctagagcttttacatcgtcgtagagtgacggagcgttttctaaacgcttcgcccgacgagagaatcgctatactcaacgaagagatggacactcttggccaggaaattgatgatactttaatagagaggcataatctctacactgaacaaagaggtcacgtccacaactcagtgtttcggtgggtctggatcggtattcctcttccagtcttcagatctcgcaacttttatagaaattatagtatgagacgcatgttgaccgtgttggccgcatttgttactgctctatggcagcgtttcgttcgtatggtgctgttggttgcgtttggctttgcacttttcaattatgtgcctaatctattccgaatggtgcttgttatcggaaaccaaatcacattttccgaaaacttcttaagagatgctttgacttatatattccgtgacaacacagcaatgatggaacgtcaccttctcatcttgaagagcaattacgatttgtccgctggaattgctggcgacagctccgtgtttaacaccacctactcattggcatacaatattacctgtagatacctaatgagtttcttcattgatttcggagaggacaccgctgtgtatattgacaacaaatcgttggtgttcaagtttggtgatgtaattaacagctgcttcccggtgttgacgagccatccctggtatgggacctttgtcaccgtctcggtgtatatgttgtactctgtagtgggaatcctcatctgtgtgaacatcaactggttctacgcagccaacattctcaaccgtatcctgagatacagacggttttactttagcttggccaagatcgtgtggaagagcttgttttcggaagtcttatagcttcttaagattgcttcgcatttgctatcttgcatagtcacattttgcttgacatcatgatctctggaagatcttgttaatgacatttttacgacaaaattaattagagtataatagttaatttataaatgactattatcagtagtctgctatttgaggaattttttttgtgttttatgagaaatcgttgcaaaatgtttaattttgcacccaattcacaataacttacatttgtggaaaactagtagtgattgaattaggagtacactagaaaaccatttatgaaatgttgataaactgcttatgctacgaagtctatattttaagatttgtcaataatgtcgaaagttgggacttcactgaatcgtctaatttgtccaattcagaagtgccgtagtcgaccaagttcttctccaaatcgaaaagcttctgtttgagaaccctttcattgctatgatcgcccaaatcctcttcagcattcaagtgattgaattcttccacgtcttcaaggtcgattccaagcccctttgtattgaattctccatataattggttattgacttcttcccacttcgaatcaattttatcttgtgctgtttcatcgcccgtactagcctgaacctccaaaaattctttgaataatttcctacggagaatcgttctttcggctctagaattcaactgtttaaggaaaagctcctcatcaattcctaaattggccgacgaaagatttagcttcacagtctcctcatcaaaaaacttaattcggagggctacaagaaatttttctatccaaagaacaagccctttgaataaatgttcgtcatctttgacatacaacgtgtgaatgaacttccagagcacatcctcatgtttgtcgaaaagcgattttaatctgtcgaaaacttcgaacgagtttaaatagtaaatctcttgattgttgataatactgagttctttcatgagatcgtccatgaatttctggaagtccctgaaaactacatgaatatctgctttggtaaatattctcatcatcggctggtaaaacaccattaagaagttcttgatgagttttgtcaactctggctctttccatagctgcttgaaaagatcagcatccttttttcttatttgaacctgccagtattgcttcaaatttaggtacaaagcagaatctactacattcttatgttctgccaactggtcgtatgacatttgggacttaacaatctggctatacttgtatttgtcttcaattgttctcaacggaggtttaatgagatcagtggataaaacagttagcaaaagatcctgagacttctcataagactccctctttattgcatcaactacagcatagtccacatcagtatacctttcaattctttcaaggaatatctcgtactccgaatcaagcttctcttctcgaagtaatttcaactcagtttcgtagctactcaaactttcatccaacaacatcacaaatatcattgagagtagatttctggagccggacttttttgcgatctctttgagctcttcttcatccttggatccccaactaggaatggacacagtagggatattcacaagtaagaggtctactattcttgaaactatcttcaacggattggtaaatctcaagattccataaaccaagttatatgggaatagtctgtggaatttgcgacatctattcaaccaatcattggaattgtcttgactcaagaatacttggtataaggttgcagctgcctcaagcttacaccattcattaagagttttcaaaaacggagtctgtttcttgatatcagacgatttgcctatttgatcgaatataccagaaagagtgctcggattcatgatgatgtctttcttcaaagattcaaagtcttttgtaagatttacaatgactttggctgtctgcttttgaaactccacctgggttttcaacatggtcctttcatgttcaattctgtttttgtgatcctcaagttcaacttcagagagttgacggtagttaaaactgccgtggtcaatgaaatctagaaatatatcggaatgtacgatttcaggatacttactaagagttcttaaatagcctcttaacgaaagcctgagtttttctcttactaattttgttgtttttgaagagccatttacagtactagataacgatgccaactctgattcagtgtctttctcgtgcgcaatatcattgtacccgttgtcgttactgaattttcgaggtaattctgaaacctcagtagacattacgcctggcaagtgtcgcttgagtttgctttccaaagtcttgaattcatgataatggcgtgctataaaatggctcttatactgaaaatttccatcaactgactctctggtggtgacctgtatcacaaattcgtaatggtgtcgaggggccagaggtctagaggaggtcacaaatctcattgggctccaagaagaaatactgtttgacggagttcctgctacagctgcgccagttcttcttagagcaacgatattgatactcaagttatggtgaaactttttcatatcgtgtttatcaatatcgtctacacacaacgcgtcgtcattcaaattggccagaaacttatccattttgccagtatccagaggcttcaaatggctttcattgaggtaggtgagttccttattggtgataatgacagaattgtagaacaacaacattccagaaaggaatttcttgttgacttgtcgtcttttagttgcatttgtttgcctttcctcagagctactgatgttcttgctattgaaactctcaacgaagggctggactgtttcctgccagaaggcacgttggacattgtctgaattcgaagcgatgaatgggaattgagcaacaaaattgcgcatatagaaagttgacaaaggtaaaacatcaaatcctgactttttgagggtcgtcttgaacggaaatcccaccaactcacaaacgtctgctcgtgagaaagtgtggagttcatcagagagccgatattcaagaagatacttcttgaggaaatgctcctgcgccggagttaggccgtcaagaaagtcgtttgaggtgttcttcataaagatgccgagctgtaagcaagaaaatacttctcgatgaaaagtagatttgaaatgtaggaagctactgaagctttatctttatactatagctgaatctttttggaatcgggtgtatatacaggtctctatatacggctgattttccgtagataaagtctattcttctttcaagtttaaagaagaagtcaatatataaatcaaatagtaaaacaggtggttttatctgggagctaattttaccgttggtatgtcccggcaacggcataatacgcaaaaacatccaataatcttctctatgggcaatgtccagcttgttgaacccaaataagatcctgcatagtttgcatcatattataagaatggcatgtgatcgcagtcacgcaccatacctgattagatctgatttctgtctagaaagtgccaacagcaaacgcgacattgcacgacattgtgtagctttatatcattttgcaggttggcgtttgcacattaatttttttttgtatgaagagatgcctggcagaaattttccatttcgagctaccttagttaatacttctagtacttttcttttcagttcagttttaactccttttttttggtacttctctctggccaaataatccacatttcaacagcaatgggtactcaaaagaaggaaaagcaaagaagagtcagacaaaatgacaccagagacggaaacctccgtgtgaagggtgaaaacttttacagagatgctaagaaggtaaaacatttgcagatgtacaagtctggtagagcagtaagaaatgctcaaggtgagattgttcaagctgctgcattgcagagtacggatgctcctactgccagagttgatcctaacagaaagtggtttggcaacaccagggtaattgctcaggatgcattgacccatttcagagaagctatgggtgacaagaaacatgattcgtaccgagttttgttgagaagaaacaagcttcccatgtcacttttggatgaaaaggaccaaaccgagtcacctactgctaagattatcgaaaccgagtcttttctgctggctttcggtcccaagcaacaacgtaagaagccaagagtagctgcttctagtttagaagatttggcccagctgacggaaacggaagctactgaatttcaggaaaagcaggaactcaattcgaccttgggcttaatgggaggttctttccttgacaaagaagactttacccaggaggcaaaggaggccatttttcacaagggtcaatccaagagaatctggaacgagttatacaaagtcatcgactcttccgatgttgttattcatgtcttggatgctagagatcccttaggaacaagatgtgaatccgtagagaaatatatcagagatgaatgtccacataagcacttggtctatgtgttaaacaagtgtgatttagttcccacttgggttgcagtacgtgtacttactaacatttattttggttcagctttgttttcactattctattgtcgttttttattcaattctctcctctttctttctttctctccaccaaagccttttgtcagggtgatactctagactggtcttccagtcatacccacaatgttgcctgttacgtctttggaagaaaaatagttttcgtccgtgttcccagacttgtctggttcttcagtcgttttgattgttgatttgttcacacttgtcttccgttttggttgacttcttagaaaactatcgggatctttttgagttgaagcttttcgaggttcgtcctccttcatgattagcttcgtagtatagaaaccgacatctcatcataaagtttattttcatttttcaatttcaattcttttcagattttcaatttcaatcttatacaaacaaagctgattcaatctaattgattttcatgacatttttactaacatctttaggctgcatgggttaagcacttatcgaagtcatatccaacgttggcattccatgcttccatcaccaactcttttggtaagggttcgttgattcaattgttgagacaattttctactttgcattcagaccgtaaacagatttctgtaggtttcattggttacccgaataccggtaagtcgtcgattatcaacactttacgtaagaagaaggtgtgtactgtggctccaattcctggagaaaccaaggtttggcaatatatcacgttaatgaagagaattttcttgatcgattgccctggtattgttccaccttcttctaaggataccgagtcagacattctcttcaggggtgtcgtcagagtggaacacgtttccaatcctgaacagtatattccagacatgttgctgaagtgtgaacgtaaacatttggaaagaacctacgaaatccacggctggagcaagtttgaagacgatgcttctcttttggagaatgctagtaccgagttcatcgaattgattgccagaaagcaaggtagattgcttaagggtggcgagccagacgaaagcggtgttgctaagcaaatcttgaacgatttcaacagaggaaaaattccttggtttgttcctccacctaaggataccgaagaagaaagaaccggtaccgacaacaaggctggctacaagagaaagagagctgaaaaagaagaaagagaaaacaagaaagcgaaggttgaagaagaaggacagcaacaagaagaaagtcaagccgaagaagagtggaagggtattgaagactaaatcagtagcaaagactagaaccttcagtttagctgaagtttaactaatatttcatttctgtacaatagagcattcttgagccagggtagcattttatagcattacataatacgattacaagttaatggaacattctatcatagagcttggatagtgtagtatatagtatatattaattgcaagaatcaatatctaatttacatggaaatgaagaatattatagaaggaaaacatacaagtacaagtttgttctaaaagcggcatagcaaccaacaaaagtcaaaggggtcttccatagtgaacgacaccgctttttgagttgcctcccgagggtgttgagggctgaggaatggccccgttgatctgaaattgctcgtctacagatccgttaccatacaaattgcccaagccccagatgtagcccttgaagcgtgaaaacgaagcaagatcaaaagacgactgtctcaaaagctccttgaaacactccattgacaagtaggcatgtaaagtagaggtcatttgctgttgatggcccggaaagtgagatgacatagacgcagcaaagtgttgacggatagcaggagagataggcaataagtgcaattcttcagccaaatattctatggatggtttattattggaagccttagctgtatcttcgccattgggtgtgttcaacaactggctaccgatatacttcaagtcgtagaagttggggaagtacttggagcaccaggagtagaagtctttttcatcgacaggaagattatcgttgatgagcaagctaacaaagaagcccaagtcatacccagcatgataactgatccaattgatggacaggtccaaaagcaaaccactttcaatcaagagttcagcaaatgaaaaatgaggaataccctgagtcatgtgcatctggaagtttatctgcgacgactgcgacaacatggtcaaatgttcttcgttgaacatctccttagtcaagtcatacaagaagttgaactgccagatgatgctggaactgatctcgttgtttttgatcttggtgacacagaatgacaactggatcaagttcaacaagtccaggttggaacgcaacgtctggaaatgatagtcagacgatgacttgaacgtgcctactggtcttgctacgatgcccgggatttcctcgtgtatggcgatgaagatcttggatgtcttgtcgttgatgaaggttcgtaaggtgtgaaactcattttccaagttttgcacccagacctctttgatgagaggagcctgattatgtaactgatgagaaggaatctgctgttggacttggtgggctgcctgatgggctgcctgtaactgctggaactgatgctgctgttgctgtttctgctgttgtaattgtaattgtaagacaggatttaccagagctccagtggtcaaaccagagttcaaaccagagttcaagcctgagcctggaccatttacattccctggaacgacgtttccgttagaagttccattaattgcagctaacaaaggattagtactgacgttctgagctgtgggtgttcctatgggctggtgctggtgttgttgctggagatgatggttcaaaagctgttgtctctgtaactggtgctgttgcaactggagctgtgaaatctgcggggactggccggtagcattcatgggctgttgctgctgctggagttggtgcagctggagatactggagatgtggattaacgttcatattagaaaatgatacttcagtatagaagacacaatatcacaattatagacggataaagttaaattttataaagaatgagatcacaatctagtagatttatcaaaaggacttatcaaaaggacttattcaagaaagaagatctattcaagatggtggactttttcaatagcaatagatttagtgtcgtagacttattcaagatgaatattatagtatatgagtccgaattcaatttattcagacaaactttttatatccttcttattattgcttttacgtcacttattcaatcacttgatttactgaggtatcaagctctgactctgatctttctgattctattcgaagataaatggtattcaaattggttcgaatgttggcgtttccagacggatttcgcttgttcttcaagcaacacgcagttcaaatctattcaagctgcaatatgccacgtttcaaagcgtcaatccggatatttggaggtttgtcaagatggtctttggacaaaaggagcatttctatgtaacagagttgttcttgaggttggaaaaaattgatgagtgatgtgcaggacaaataaatctatggagaacaagaggtatatgaatagaatagtagaaatagaagcacatgaaggtaacgaaaagacatttgtacatagaaaacttagaatgtaaaccgttaactacaagtatctgtatttgttaagtctttcaaaaatcaatttttttcagtcttcacaatttttacaattcaattctacaacacacattctctactattgtacatttttttatgtctttataactgctctctgtggttggtgcctcctgaaaaagcattgttgccttgcaaataattatgatcccctatccttctaggcttgatcaagtgttgcaacaagaaagcaacggccaacaccaaggcaatcacagcgacgatgatgtatatcacacccaagctcatgtttctacctccaaagatggagttggtagtgatgacaatgctcttggagccgccaaagaccgtcacggggtagtgcaagtcgatggagatttggtacaggccagaagacatggtgtctgtggtattctttccatacaacttgtagaatgacggaagtccagccgttctcatccagttgtgcaaatgttcccaggttgacaaatctggcaagttcgactcattataaccattcgggaacattttgtcccaatttggaggaggcacaatgtcgtctgggttatatgttgttttcttaaacttgtggtctctatctgacggccatgagatacctacgtcactggtgagatatgtttggttgatgctgttgctcttggtgttcaataacacgggactggagatggtatcgttgaagtacgagttggctatcaagccacaggggtagataagtttctgggaatcaccagatccacgatgtttcaacggcttgcaggcatcagtaacatcgtcagacgaaacagccttaccgcctaattggcccaagtcgtaggagtctacatacttacggtgattttgaaagaagttggtaagcttgtagtagagaaagagcggaggcttcaagtcagtaggtaagtcgaattggatttcacaagtttggtagaaatcagacgaattttcatcttccgtgctgttcactattcgccacttaaagccagggtctttattgttcagattgaagtggtagctggtgtatttattgggcacagactcaaaactagaattggccaattgatggcatttggaatagtttactgtcaacaattgaacactgtaggtagtatggagaatggcaatgcctagtggggcaaaaatgaccgcaagaacaaagaggaatgggatcactgaactgggagttaagatgggttgccatgccttgagtctttgctgtctgaatgctgtgttaggtggttttcttgatttgtgaatgttggaggctgaggcttctccgaggatatcgttgtcatcgtcatcttctgacgtctttctacggcgcaagaagttcatacctagacagaattccttgacagcagagtgtaatggttggccttaaactcgagaataagaactaagtcgaatggagagatcaaaattaaattcaaggctgagaagtcgtgcacccgcaagtacgtctgtagtctctgtataaaatgtgcggtattctaaatatataaacgtctttattcaaatcctcttagaaaaatcgttttcttagtgtacagtaaagacatagtaaatatatattgcatagtcaattccaactgttgtctggattttgaattcactttttcggttttcgtgtaaatgaatttgtctattttttttctaaatgtttctccaaccatactctaactacaactcttctatcatgacgtgtatactttctattttggtggcctattaatcattattaatcactacgcgtagcagtgcggttgctcttcttcccaacaactttcttctcgcccttggcagccttctgttgtggagtctgttgtggcgactgtttgctatttgtgacagctgagcccgcgggcttgtcctttttcttgttgatgctgtggtaactgttgcctgtctttgactcacgaggttccaacaggatgacgataccatctacaatggtttcaccagcttcaagggccttgtgttgggcgtcataggtgacaaagtcacagagcgcaatgttcagattggtcttgaagtacttgagctcaccaaagtgttttgaaatgtgatctctcaacaatttctcatcgagttctctgatcccccgaatgtagatggggtaccattcttctttctttttgctgcctataccattagctggaggggttgtagcagctttcttggctggggctggagacaactttgctacagcaactggcttattcttaggaggagcggcctgtgaggccaatgctgcccaagacaaaggttggcctggagcagacttggcagtcacagcagtagaagactcttcttcgttcttggaggccacagagtcagtaggagacaattccttcactggttcttgtgtagattccttagtttcagacttttcaactggttctggagtcacaggagcttcaggtttttgtttctcttcagatgggaccgaagaagcggaagtggtttcagactcggcagaagcagcagaggaaacagcggtcgtgttggcagaagcagcagaagcagcaacagtagcaacagtaggagttgcagcggcaactggaacagttgtagcagcagtagacgttggagcagcagtagaagtcgaagtagacgttgacgtagaattagcagaaatactagtggcactagaagcagccttgggagtactagtagaagcttcagtagtagttgctgcagtagcagaagcattaatggtttctccgttacgaacaggtttcttttcttccttcttaacggccttgaattcaccaaagtcgataaatctcaaaacatcattggctacatcaaatgagttttccttcttacctggagtcaagacgaaggtctgggtgaattggtgatagacagagtcttctttggcccattcaccaaatacgacaatcaagatgttcttctccaacgaaacttcaaacgcggccgaagtgactacgatacggttgtttgctttcaactctggatcgttcttgaaacgagttctgatagcttcggtgccatgagcagcatggatggttttaacttcgtcttcagcagtattagcagaatccactgggaaggagtcgtgagaaatcagagcgttttggtggtatatcttgtggatattctcgatgttggtgttgtagaagtcgtagtaggatacgatgaagtaccagcctatagaggaggctctttcctgggacaaaaccgaggttggagcaggggttgtggccaattccggagccgtggttgcggcagaagccggaggtggggacatggtcataccaggaaggtgcgaagatgaccggatgggactctgtatgttgtgctgagaaatacagctgcttcgaggagtttggccggggtggactcttgaatttttcactttgtaaatggcgattagaatgcggtaaaaggtggaaaattttgatttttctttgggatgtatgcaggctgcgagattagtcgactgtaacaatgctagcgaatggaatggaaatgtggagagttatggaagagctaaagggaagaagaaaaggtgtgaaatgtatggagatatataggtgaatgtaggaagttaggaatagaaaaattgatatgaaaattagacttttttgctattctggagttttttattagtctggtttggcctcgtgaaagtcaagtttctatttttcagttagaataataagcatagcataaagtttctacagagcaactaaaggaaagagaaaacttaacagaaaatgtctataaatagtgagaatatcacatatatatcccatctacaattagaatttctcactttaatattctcatggttctccctcgtagaaacttaccatagtcagcttctatggtaagtttgtctttttacttttctcatagatattatagcatttcatggcttcacatctacaacatcattccatagatgccattctactctcttctacactttctcttagctaagcttagtattctatacgcttattgacactctttaagcaactcttccaatatctggttctccaagtcgcccttgttgctgacaccgttgaagctcttgacacccattcttctcaacacctcgatggtcttgtcacgggggaagcccatgttttcgaactggcctacaattgactcgtctattccgtaaagggccgagtcgctgaactcggacttgccctcttcgtctctgtcactagcatagatcttggtccagtacgcagctgtttcatcaaagcctgtcttgttagtcaagtaatgcttagcaacttcagcatcttgtggatcatttggttccggcgattgtaacaacgactgcaatgatatcaaggtgcttttcaacgtcaagatgggagtccacgcgtccttcaagatatccaaacagatggccccagtcactgacgagatgttgggatggtagatcttggtcaggaatttcatcactggtggtttgaatggatactcgttggggatggtgatgtcaaccagaaaaacacctccttggtacggagtgcctggtggccctttgaagaaaccagtcaacttggtcaagtcgttttcattgttcaacttcaacgaaacaccagactgcgtgtcttgacgacattcttctaattctttggcaattctcttaacacgagacatttggtaagacttgagaaacgaagtacaaatttatggaagaatgattcgtaatcaatgaattacgtttaatgaattagaatcaatgaacaatctcagaaatactgaatgctccaaaacgattttttttttgagaactactggttgggaattcttcaaattagtcaattctcccaattcgttctgacctcacagttacttcgcgatcgtttggatgttgaacagtcctgtggtagaaaagatttgctgaattggcaatgaacagttgtgtgtattgctcttgctcgtaagtgaaaggttgagtgggaaatcggactttgtgtcacgagataataaaaatgtattctgtagagtaagttcttcgtgaaaagtctacacactcggcaggcttctaccgttcaatttcattgtaagcgaatgcctctatattattaatatgaaaattaaatacatagctatattacatacatcttcatgtctcattacttctattattctacatactaatatacacagctcaattctcagaagtaggagtcgagcccttgacattcttcgacaaagagtcaaagatattcttcaattctggcgtggtgtcttggacaaagggcaagtcaaagaaaccatagtcgccattcttcaccaattcggtaaagacaatagtcaagccccatggatgaggtttgttcacaattcttctctccaacaacactctcgtgatcaactcttgaatagtagctttggcagcagcagttccccagatggagttggatgaaaagaaatgcaatataataccaataaaccaatgagtatggctattagggtaccgcaattggttggcaatggcattaatcaaatggaatttgaactccagagagccttgattcatcaaatcaaccaacaatgctacttgtgacgacttcgtattgaaacctctgacattattgggcaatctgtcggctacagctgatataccaacatgcaacactaaagcattgaccaacttgacgttgtagtgaaccacttctgattcgctgatttccttaggatggtttaatttaatacctccataaatagttctcatcaaagctggcgctggaatacggaggaaattgtctaccggctttttcaagccaaccttcgacaaatcgtctaccggcttataagctacaactggagaatcgttgatttctggcaatctttcaaccttgagacctctggtgaaagggtctggtaccgatacactagcaggagtagcagagagaacaatgttcttcaattgcgtgtagccctttgggattgcagtgaccaattggtagtggcattcaaccaagaagtccggataatcatgaagcaaaccagtgaagatacggttgagtgccttgaaaatgacattaacaacatcatgattggaatcttttccataaacgcattggaacttaagcaaatccgacaataacttgacagcggtttgatagccagctccatcaggcaattctagcaacttgggcaagaacagacgatgtgcaatcaacgaaacccatgcaaaagtgagaccaggataaattattggctggagagcattgaaaacttcaccaatgtaaaggtagaattcttgattcaattctgcacttaactcgctaccttctacactagtcaaatcagtccaggaagataacaaagatgagaagaacctgaagtatgctctttcattccaattggccttagcagtctcgtggtcgtttgccaagaccaagaggataacactaataatcttcttcaagtaatcaatagcttcttcattttcatcgaattgagatacaattctcacaatcaacatcgcaagagtatcgactgccaagtaggattcccgaagtgttctggatctgatctcatgttcagctgcaaatgcagctactgagatctcaatggcagccttaaagaaaacctggaaataagtaggatcagtcaaaatttcagtatccaacattcctttaataaattgttcttcaaggtcctgagacttttcaccatgagtcaataacttaacccattcagcaaatacatagcctaactgactgtagagctggtttgaaacaggagcagttggcctgttcaacaactcaattaagttgtcacgagccaacttagcctgtttgtcttcttcagtagcatcatctcctgcgtatttgttcaaggcgtctaaggtaaagccgaattcagatctcaaagctattggtcttaattcagtcgaactgtagacattcaagagcaaagtggcagcaaatttgaccacaacgggattgttggattcgttgatgagtctaccaatagatgaatcaagtttagtaggcagaaccaattgaaccttcaacaaagagaatataacaggcatattgaactttctctggtcagaagagtgaaccaaccaccaagtgacatccttggccgtggaaggagagtactcacagagcttgtccaaaaagacgacgtagatctcattacacattgggttatcatgaacttgagtgaaaagacagttcacagcatactgcgctgccttcaacaataattctgggtacttgatggcatttgcctgcgcaataccaagtgcttgagttaaagattgcataatcgggtggcttgggctcaagtctgacaatttggtttcggtcacgtccgacaacaattggatagccttttcacagctttgagtaattgccgtgaagagctggtcaacaggaatagagtcttcttgtacaacagcagttggctgcgacaaagacacttctggctgtggaggtgtgacttcagtactgctaccactgccaaaagtctcgtatatactaagctggttggcactaagaccttccttgcttaaaccaagaggttctggtaattgcaatgaatactcattccctgtggaatcgaaatatggctcagcagcattgtgctgttcacgggcttgaacaaatctttgcattctctcatcgatcaattctgcgatgttatcagaagcaatcttatcaactatttctacgcacaatccgacattggcttggatggctgcattcaactcctctaaaggcaattccagagcgttgttacctaacaactgcaacatagttgcttcaatagtctcagccaaaagcttacgcccactgcacaacaccatactatgggacaactgttgtgccatgttctggtagcttctcctaaacttgaaagcatctctctcggtagcgaaatccttattgataagggattcggttgttgtcaaaacagcttcagagactctgctcaagattggaacagcacattcacggacggctctagataaagaagcttggaaggctcttctcaaattagcgtgttgggtataaatactgtttccaatcaagttgctgaaactagtatccaatccagtgtcctgttgctgagcttgttgttgttgaggaggttggtccttgaaggcaggttgaagctgaggaagaagagcagactggggtggaagtgagtcttgcacaacctgttgagtaagagctgccgggaattgacggggctgtaattgctccaaaggatgtgctccttctaagctcaacctggaaatgtcattggccaatgtcaccgtctccggatgaataccgaacattgcagccaatgaggctggatttggattgtgtacttcaatcaaggtagaaggctcgacgtcactaatcttcatcttgaaagaattaagtaacacttcgacttcaaatttaaggttgagagtcaaatcagcagtcttgtaaagttctgctaaaactttgatgatacccaagacccatggattgggtggtctgaaaacttttgagtactgagcttgatccaaaatcttacaaacaaatggaataatcaatggtaacgacttgaagtcataagcttcaactaacaagaatttcaaggcaatctggtctcttctcaaaggcttgtcgttagccaaagtaattttacctagccattgccccaaattcttcaattggtttcgttcgttcctggcatccttggcatttctaattaaacgttcaacttccttaagagagacgtttaaaacatactccaagagaataggctcgtcaatttcttcaatcaaagtagcatacaaaccttggttgttcggctcagctttggccctgtccaccactaagtagttggaaaaccaggcaaagtaattctcagttaataagtccttcacttcagaaacctttaagttgtcttctgtcatgttgttgacaaagaaaagcaacttgtccgagattgtttctggtggttcttcttgtttgacaaagccaatagtcttgtcagaaacagttattgactggtatcttggaccaacttcgggagtcgacgtaacagtctggccacatggaataccgttggcggcatccttaacaatctggtacatcttagcatgtgcagataacgaacggcactccaataagtgcttacaataaataggatactcatgtaatctggacttgaagttgtacaatgattgaactgcaaacttgaataaatgggagtcctgcggttggttacaagattcccagatgaagttcaaagccaccgtcaaagtggtaccctgaatcaagtccttctccaaaagagcaccaaaaagtaatgaggttgatgccaaagctgacaaaggatactcagagaagaatctgtattcatcaagtaaagagtgaatcatacaagcaaagacgtcttgctggtgaggatcgtcgctggccttcattctcacgagcatgtctacaatatccttgatttccgtttccttattgtacatcttggaataatacgatttcatttcctgttctacgtcaggagggaagaaatttgagttttcagcgttcgccaaaatcgtctcgtcgtgaccattaccaaagttgatcaatctgggatacgttgttaaaaggagcaactgaagattcttcaattgttctgagtctactaatccaccgttgctcttcaacttctccaaaaaactgtacacaaaaggaatcttcaataacttagtagggtctacaggtgtttgaccaggagtagctgcagagccgctcgcggcttggcccttgtcatagtccctctgcgctctttcttctaaagactcgagcaaagcttggtagactgttgcttttcgatttggttctccgagtttggcatcgaagaacgatttgtagtcgaagtcatggagagtcgattcaatcaagaatttcataccaattttggcatctgcgttccatgcttcattcaccacagtgtcaagcaatcccacagaagaggcgacatctagtatctttccgatcgaatcaatagtcttcttggagttgtagtagtttaccaactttgaagcagccaaattaggactcaattccttgaacttcaagattaccttttccaaggctgggctatcgctatcgttcaacaaagtgaataaagtatcaacaaggtcgttgaggaattgcgttttctctggcaaagtgagagcagcagcaattaagtattctggaaagcttctgtagtcgtgttcaaagagatggttcaaataaagattcaactttcgctctggttcactaagctgttgcagttgttgttgttgaatcttggtcaacaccagaagctctagcttaccaatactgacaaacttcaagatgtttctcctagcagatgcttgttgtggagtagactgcgagtttttatcgtcttcgaagcaaaatgatacgttcttcagtaaagtgatatcataagcaccttgctggggatccatggtctgcaacaaatacaataatgtcttgttgaaccaccactcgtagttcaagaagatatcaattagaccttctttgaagtccaatgacgacaagatctgcgtaatgctagtgacagtaggctggatattcctctgctgcgaatcaaacaagttctgatgcacatgcgagaaaacttcgtaccaatttatggcgaaattatttgttccttctatagaacggaagcaggcttgtaattgagcacctttagcgttggcttcaggtaggttattcacaaacgtcaagctagaaggcaagccctgagatcctgggatcaagatctccgacaagagcaaggctacactttggtctacctcattaggtttaatttggagtaaagccggtaacaacttatcgggcaatatgttttccggaccgatttctgataacaattctttgaaggacatgtctagaatggactggtagaaacggttgatgggttcaatggtagatttgaaagccttgagtgagctgagagtcaagagcttatgagttaaagggaagaaaggggtgtttaagatgtagtcaagaacgatggtccacttatagttgggtggaaactctcttgacttaatgaaagtgagaagcttaaacgcgttgtcctggatgaacttcttggccgaatcaaagtttagagattgaaaattgataaggattatgaaggataaaattagatcgacttcgaacttagtgacaaaggcaatgatgtcaaagtctgcgtgaaagagcttagttaagtgtaggaataaaagttcaagatagttgaggtctctggctacgtgatctaattccttctgaaagagtctttctacagggagaagctggaggctgtcaggggattggagacggatgaaattgacgagtttctcgtagtagttgttgaggacaatcggattgtgagcctgtttatcgagaataaagcggatctgtgaataatgagaatcaagtgtttctccagtagccgtggtaatcaatatagacaactggttgatgacaattttcgttaactccgggtcttcgagattatacgctggttgttgatgctgttgttgttgatgatactgttggtctaccgattggccctttgggctgttcaaaagtgcagattccgacaaaatggaaatggtctatggtctgaagctgacgggatgtatgatcagctgatgctgaatgactgcaattgaattggctattctgcgaaactatcaataatcaattgtatagtcagatgtatagtagccgtatcaatagaatattgaagtagaatattattgaatgaatactatgatttctgttgtatgctattcttttgtatgactgtcagagttgtctatatatgcgaagacaatcagtatagtacaaagcacggggaaaaagtcagaatacaaagaaatgacaaagcaagatgcttggtatgatagatctaatcagtagtctagaatacctgtagtgtgatgatgactagggactacgtaaagaacagaacagaagtcgaattgttcaactttagacacgcactgtatggggagtatgttagtggcgcgaaaatttttatgttacccggccggggctaccaatagatatatatagaagctacggtaagagacgtcaatggcacataataggcggaaagatggggaacattgggaacaacaagagtttaatgtaagcagagcacttttagaagaattttcagttgccacttcaaaaaaaaaataaaaaaaaatcgtctctcttatgcttatttattactacatccacaattcgcagccatttcactttcaaagtgaatatattccagagtccctaactaacctttttgtaatagtatatatacaatataaatagtataatgataatcattatgttcgtataatcatggtgattctaagcttcaatggcagccaagatttgctctctgagatccttattggcgtcattgtcttccaattgcccatatgatctcttgagcaatgccttcaacgtttcgttctcagtcttgagctcttggttctgcgcagatgtcgaatccagcgacaatctgccagtcaataagggtaacttcaagtaatctgtgaacgactttgtgtctgtgaacgactttgcattatcactaccagcttcactgatctcagaatacaacgactctacttctgtgtttcttgtattggaagcagcattgtgggagaatacagaagtcgacgattggttcgatgccccactgttcgttctaccagaagatgacgaagctgacgaaccagatctggcacgagatctggcacgtagtgaaccaatgtgaagcgataattgcacaaacttgttgataatcggatgagactccaaagatggagagtcagcatcggatgcaatctgtttttgacagagaaaaagcttgtcatcccaagacatcaataaatctccaaagaacaagtccaagtcgttgatcacgttaccccacttggactcgttcaagagatgctgatagataacttcttcgtcacccttgtcaagagtcatcaagatgggcttgttgctgaccaaaagtccaagcgagatcttgaagagaccgactttccatccttcaagcatacagaagtccatgaccttgttaacgatgctcaagtcaggcgaatgagatgagataaacgataaccaccattggaaaagaaacgactgaagttctacaaagcccgtcaaatggtcatagagcttctcgtcggtttccttcaagatgtacaagaactctccgtaccacttgttcaaagtgctacacatagacgaagtagtgaagatgtcgtgcaattcggtctccgactccatgatggtaatgagtgcatgtaatgtcatctcagcatcacctttgaattggtagtacaacactccgacaagaaacaagagcccctggcagtagcccaactcagcgtcgtagttggcgtaaacgttcaagattgtcaagagaccatcgatagcttcttggctacggaagaagtttacagttggaaatgttctgttcaaatctttgctgatctggacagaaatctctgcagagtatgagtgttgaaagtttctgaagataagctttgttgtctgaggaatcgaagtatggttgagaagcaaaagtttctgccagatcgtggatctgatctggttggggatcccttgtctgagacaaaggaactgagtatagttaggtaaagtattgatagtagtagttgggctattaacaaacgaaagccaatagcttctttctaaattagagttgatattcagttttctttcgatataagcagtacagcacagttggagcaagtcggcgttgatgagggtacggccacactttgaacaagtggtgaactcgtctttagtgaagtcgtactcttcaaaaagtttgtctaaggaagcatctgtgaactcggtcactgaacaggtctcattatcgtcttcatcgccatagcgaagagaatctatcttgagctcaaggttgtagagaagcaccgaagagtctggaggagacagcgtacgaagcgattcttcgaattcgaggagcttttcgtagtctatcattctaagtgagtgaaacaaaaaccacagcagtgaaattgaacaacaattgatagacgatatctatgacggaaggcaatgatatttgtatgataagatgatatcaatggactaggtacctatctgaaagcaactcagtgaaaaaaaattgtctcgattgttatcgattcgatatcacctaatatatagaagatatggatacagagacagcgacaactgatacggggttaaagtgaaaatatcctttagagcgaacgaatatctccttcttacaattggactaattcttacaataagatgagtcaatattgcctggttttagtagggggattctgttatcagacaattctcaagtggtgatggaatcaatatttttcagctatattatatagctatgcggctgacttttgaagaatatggcaaggagtagtgagcttcttgtggtgaaaaaggcgatgagaaaaggaatgaagtcagttggcaccacgaagcaagattagctatgaatttaaggtcaaaataccggttggcgtccttaccacatgaaattcacaactggtggtcgttctgggaaatgccaggtgcagcagctctgattcttatacaaatctggaaattctggcgcagaacacaaagcacgaaacttctcgttgttgcaggaggtggtcacctgaccagaaatggctgggttgtagttgcttagcgagtcgtaaataaacaaacaggcaggaggcgcctgtcaacgctaagatgcttgagcttgcttacggctgacttttgtttcaactttcaggctcttcacagcgaaagttgggtggtgtggctaattagtcccacttcttaccagcaccccagcaatgctcagtgaacaaaaatttttcactgctcatcgcatgcttccagcttgccaaacatgttttcaccacttcgggaaacgttttgaagtcgtttgtcggttgcttgtcacgtcgttctagacacgtactggcgtcactagtactgcttaccatacattctcatgtttcatgctactatgtactacttgtgtgtgcgattgtgtaatctcagccctcagtagtgatgtcataccccaacgggaacagaacaatcagaaacagtatagcctacccaccaacacgtctcgaaaacgcagtacttcgccgtccccagatcattgcctagacttcccgccccagatcaaaatctagtgaaattggggctgtttcttacagagtaagagatttgaggcgacagcgcagtcacgtgttgaagtaatacatgattgttttcatccgaggggtgctaccggttcgccctcggatcttgtgatttttcactatagctttgtcttctcggttgtagtttgacacaactatacgagttacttcccaaaaagcacctggtaccccgcgaaatatggtttactacttcacggccgaatatggtgacctgtctgagttggatgatttcggttttggcagcgcttccgtccaaacagctactatatatatgggaagagataaggtagagaatgatcctctaatcaagcattcgaaccctaagaatatctggtttcacgtggataactattcgtctgcgcatttgtatttgcagctcagtcaagaggacctcatagctcccaaaccgtttgaaaaatttgtcattgaagaaagcttgcttgcacagttagcacaattgactaaggctaactcgatcaaagctaacaagttgaacaatattacagtgatatatactccggtggagaatctccatactgatgggtctatggacatcgggacggtgacattcaagaatccaaaacttgttaaaagagtaaaggtggtaaagaaggagaatgctattgtaaacaagttgaacaagacaaaaactgagatatctactgaaaagtttatcgaagagcaacagagtacagtcaaagacttggaacgacaacgtaagaatcaggctcgtgccactgaccagttgaacaagcagtttgaagagcagaaggctagaaacgcagacccatatggcgacttgttgaattcagacaatatccagcacagtagtaatgagttccgaaatgagaactggaccgaagaagagttctggtagagagagagcagtagagtaaaagatcgagcgagatattatacaaagagacattgtaagaagaacccagtaatctggctttgatatgacttctcattgtctaaacattcaattgatatcacatcaattttgcagaagatcttgctgcacatagtctcaaactacagtcattagataaactacatcaatgcatatctagttcaggactttcttgctcgtcaaagcttccactctcaacttgcatcgatgacagcatctctttcctacaaagctacagctcttatgacatatgaatataattttgataagagtatataaagaatttaactgttagaactccagggagtctttgtaatgccaattgaagaatcacgttggaaccgctaagtaatcgtaagccataaagacaaatgtaattggtgaaagatgaatagtggataactgttttggttccatttagacgtccatgttgacagggaacttgccggcagctctttggtcatcccatctttccacccagtcgacaggacacaatgaggtgaaggtcttgaagaaaatcttgcatggctcgaattcttcacccttgacggaaacgcacttgtggtaatcgacgtacgattgggcacaatgcttggtctggttttggtaagggaatcttgggtcgaattggacggtgtcgaacttgaagttttcgctgtcgatggccattttgtcgtgttgttgtgctagtaagaagtaagtttagaagagaacctggtaaactttttcaatttgataattgtacatcttacgattttgtttggtgtgcaccaaactttttttttgctgttctaattggttgaagcttctcacgtgatatttacatagttaagggacacgaacattatgggacgagatgaaagggctcaagtgtagagacttggtagtaggctgatagttatagcaaaatatggaagttatggagagttacggcgctgttgtatatatatcctttcgtatttacgtcgtctttgtattcgttggtgctacttttctcaattacactgctactaaaattcagcccactaactgatgctcattgaaaatctcgttactatactagcagaagcatactgttaactatgggacttcatatgtttgtacactttgtagtgctctctatcaattatctcttaatgtgtaccatgttaaagattcggacactttctagtttcttgacctgttcgctttttcctagagatcttggttcaagaaatcttccttatgctatcataaacttcctgtctgttctatgtctatctcatctccaacattctattgcttagtccattctggaggcccttgcatatccttgccacccaacaaaatatggagcacaggtaaactatactcttttcttcccttaatttcagtagacacatcttcgtcatctttttctttgctaaactttatatttgggttggtgtatgaagaatgactttggagattgttgaattgtgctatattcaaacttctgttcttcatttgctgtttgactatttcaacgatggaaatggccttcggtatgccatttgaaatggacgctatcactactggcttctcttgttgcaacagctcaagaatcttatccactttcttattcatattatcattttttgtaattggaaccaccgtagcttttatttgaaatttcgcctctaacaagctggaaatctgcgaagttatgcttttccattcttccaagctgcccagattcgtatctgtcattttctacttgctatgatacgaaaaccgcgatacttcaattatcaagatttacttctaagtaaagtgtataaaaactgaaaaatcagactgggtcacgtgaatttctacaaagataagcttaactttgaaagccagggacggaaccggatccagggccaggcggaggctgttgagccagacgtggtttcttctggtctgacttgacgctgttattgttcagaagttggtttcgggtgctgcttctggtactacttttggagctatttgttgcgctgtgaagaacagtagaagaagtatcaagatcaccatacctgctagatgtttctttattcataatctcactgaattgcaccaattccaacacatttgtatggcaacggagaagttcttccgctgtggtgtttttggtaatgggtgtaggcatatggaaaaacggcgggactttcctcttccgtttatttcgttcagacttccttttgggtgcatttactggagaaacaaatccattgggatgcaataagtagctgttgccggaatcgtcttttagtaaagtaactcttccaggggttatatagactggtttcccgtcagctcctatggtatttagtggcatttgcaccaagttggctggaggaacaggatttggttcttcattttgcacccgttcttcttcattgttcaactgaggagactcgtggttttcaattgctggttcaggagcgtcgtgaaagacgtcgtctccataggtcaaagactcggttcctagcacaagatcccgcaatctggggtcaatgctttcgttgtcgtcattggagctcattatagtgatactagaatatggattcactagtgtacagattagtatacactatggcagactataggaataatcacgattcagctgttgataagctattgtcggtatttcttcactatccagacgactaacttctgtaggtcagacttggtgttgagactcttgaaagataggaattgtagaaaaagagaattagccattttagcgcttattgcaaaaaaattgcaaaataggcttttgacttaagctagcgagaaaaaaaataattgatacgggcagaattgcaaatacatgatttcttatgaaaatcaattgatacacaacgaaatagataaagtagatatacaattctgcttcacaactatattataaccaccagaccaggctacagatggagatcagaatattggttcatttttgtttcttgatcactagattatggcagatgatgtacagtttctctctgcgttagagtacatgaacctgaattagttactagaggatcagatgtgattgtcactgtggccataggctagtatggtgtcagatactagtaggcccacttgggaaaaccgtcgatcatgctattgtttacgtacgatagtgattgcccaatcctggcagtgaaactaacagagtgaggcattagaatacgaacacttcctaattcgaaatcaaggggatgttttgcatggaacacaaaaattgccttggctccagtatttatatagactagatttctgcttgacaatgtagatcaaaccgattgaaaagatagacattcacaatagagaacataatgggtgcatggggggctaagatctttgagaacgacggagccttggatcaattagcggatttgaccaagaacgagcagtctcccttggaaagcattgtccagggcctcatggaagtgttatcgtcggaatacgtagacagttatgaaggcgaaggcattctcgtgttggcagtatttgtgataggattcaagtcccgcagctatttgaaagaacagcgagggaagaatgtgcccgaatatttgtatgaacccatcaaccgattccttgacaagtaccaatctagctgggacaaggatattcgcaccaagacttataccaccaagctcttgacggtggaacaattgacgttgagcacgatagctgtagtcaactccgagaaatcagaattgtacgagctctggggggagtcagacatggcagaatggcaagagacgctcgatacgttgacgaatgaattgatgaaccttacggcgatctgatataatagacgagtcgactttggttgactacttaattgacacctgattgttgtgacaattggctatactaattgatactaccgatgactcaattggtaatgactgtacttaataatgtaattgaccggaccagaatggccattgtctgctgatctagtgtatacgctatctaattaatttgtatggattgttttactacgaatatctcgaatctaaagggccaagacagtaggagttctattctctactattttgcagaaaagttctattttttaaatcgtattaatagccaccctctactttgctacctttcatattacaataagtccatctagatactgaatttttaggaatactgaattgttaggaaatatatatcagtactgcattacagttttatggttcttcgtgctgttcgattctgcctgtgccattacagctacaccaactctacagtactgtatgaattgcacactatccatggatcaagcctccggttccacgtgatgctccggggcatagtcaggaccgctggcattctgagatacggggtatggacgctgcaccaacggaatctggagaaaagagaacattcaatttttcaattttccgaggttgaaattctcacacttctcatctgtgaattcactttctttattgaatttatatccaattgacttctcggcacctgaattgactcctgactttgattcttgtcgttgactctactgtatgattcgtaccctcaagccgatcatccgtttcccaaaacttcgctcctacaagaccttaccttctattttcagtcgtactttcgcccactctgcaactatggctactccctacaagcaaccaccccacaaattgacgatgattcctggccccatcgaattctctgacgaggttcttggggctatggccacaccttcgcaggcccacacttctcccgagtttgtcaaaacgttccagtcggtcttgcagaacttgagaaagttgttcaagtcttctgaccccgacgcacaggcctatgtaattgctggttctggaactttgggctgggacattgtttccactaacttgcttagcccaggagacaaagtgttggttttgtcgacgggattcttttccgattcatttgctgactgtttgaagatttacggaatcgatgttgatgtcgttactgctcctgtcggaggagtggttccggtcgaaaccgtcgctgaaaagttaaagtctactaagtacacagccattaccatcacccatgttgatacgtcgacttctgtggtaagtgacgtgaaggctgtttctgaaatcgtaaagaaggaatcgccagaaacgttgattgtagtcgatggagtctgttctatcggggtagaagacttggagttcgacaaatggggtatcgatttcgccttgacagcttcacagaaggccattggtgttcctgctggtttgtccatctcctttgcctcggccagagcagtggcaaaagctttggcaagaaaggaaactgtcttctttgcctcgttgaagagatggactccgatcatgaaggcttacgaatccggtaacggtgcctattttgccacgccagccgtccagactatcaccgctttgaaggtatcgttagatgatatcttgagtggtagcatcgatgacagatttgctaagcacgctgaaatctcgtctaagttcaagtcgagcgttgaaaagttaggcttgaagatagttcctctcagccacgatgtcgctgctcacggattgaccgctgtttacttcccagaaaacatcaatggtgccgacttgcttgccaagttgagctccaagggtttcaccgttgctggtggtatccacaaggctttggtaggaaaatacttcagagtaggtcacatgggctactcagtctacgctggacacgtagaccagctcaccaaggctcttgaagaatcattggacgaactcaaatagacatggaactatgtaatcaagagatacaataaaacgttgatagtgtagtagttaagtagaatttgttgtattatggagtgatatggtagcaaaatgtgggtttctcagaattttgcacccaattttcacagcttaatacaagaaacttcaatgacaattcaataataaaatttcttcaaatattgtacgatgcatgaatttgtatctgatacgacatctatggccccatctctgctcaatcctgttagttctctgttgcttgtgctccaaaacgggcaatgccgaagtatggagaagctcgctttgcacaaaaccatttgtcggaacaattgcggcaacaccagttaatgatccgatgtttgtatcattctgaaggagctcttcaagatcgatgagcatactggtaacttcaacacgttctccaaacatgctatagtcaattactaaatcttggtaaccgatttggccatactggtcgttatcggagtttatcgagggattactagtgtgaaatgtcgcaccagtgtcgtcataacctctatctaagacaaggaaccacagtttaccaatttctataaatcacgtctatttctcgattttcaattcaggaggcttcagaaactattttgaatcattaataccgttaaagagagtgctaaatctcagctgacggagttgtgcagttttttactttgcttttttagacattcaatttataattcattttcaattcctgtgaaatttcaatttttcagctacaacgattcacttcatagcctataaagatatacaactacaaccatgtttagaaatggtggtaccgttttgaaggttctcaggccaatacggatgccagtagtaaggctgatgttccaaacacgtactttagtgctgaatatcaaaagtgacttcaaatataccaacttatccagaacatcacgaaagatttcttcaccaattggtccatcaacgttgcttagacgtggatttcacacctcaaaagtttgtaatgaatcagtcaaatccaagaaggactcgtctacttacctttttggcaagcagatttcaacctcccagctcaaaatgctcaagtcacttgtagctaccatctggcccaagaacaaacccagtttcaagatcagggtggtgatagcattgacgctattgattggatcgaaattattgaatgtgcaagtgccttttttcttcaagagcatcattgacgaaatgaatgtggaatggtcagagcatttaggaactgtaggaacagtaattggatctttgattcttgcttatggtggagccagatttggcgctgtactctttggtgagttaagaaatgccgtttttgcttcagtagcccaaagtgccatcaagagggtagcttacaatacgtttattcatctcttgaatatagacctacaattccatttgtccagacagacaggtggcttgaccagagctatagatcgaggtactaaaggtatcagttatgtattgagtgctttagttttccacatcgtgccaataacttttgagatttctgttgtctgtgggattttgacttataattatggattatcatttgctgctgtgactttggctacgatgatggcttactctttcttcactatcaagaccacttcgtggagaaccggatttagaagacaagccaacaatgccgataaccaagcagcttctgtagccttagactcgttgatcaactatgagtctgtcaaatactttaacaacgaactctatcaggccagcaaatacgactcagctttaacaaagtatcagaatgcttccatcaaagtagccacatcattggcgttcttaaacgctggccagaacttaatctttacgagtgccttgacggccatgatgtatatgggatgccaaggtgtagccactggagctcttagtgttggagatttagtcttgatcaatcagttagttttccagttgagtgtaccattgaactttttgggttcagtgtatcgtgaattgaaacagtcgttgctagatatggaaaacttgttccaattacagaactatgatatcaagatcaaagatgctcctaacgccaaaccattgcttttaaatgctcagggagttcctggtgaaatcaagtttgaaaatgtctcatttggataccatccagagagacctatcttgaagaatgcaacgtttactatcccggccggccagaaggttgcaattgtaggaccctctggtagtggtaaatcgacgattttgcgtcttgtattcagattctatgatgttgatgaaggcagaatcttgatagacggtcaagatatcagcaagataactgtcgagtcgttgagaaagtccttgggtattgtaccccaggagactcccttgttcaacgatacaatcttggagaatatccggtacggtagattggatgctacggacgaggaaatcgaagagatgattgaaaaggttcaattgacgaacttgatcaaggatttaccagatggtgtcaacactattgttggtgaaagagggatgatgatttccggaggtgagaagcagcgtcttgccattgccagattgcttttgaagcgagctcctatcactttctttgatgaagctacatctgctttggatacccataccgagcagtcgttgttgaggaccatccgtacagtcttccgtacaaaaaagaataccaatgtgtcaattgcccatagattgagaaccattgctgatgctgacaagattatagtgttgaacaagggttcggtgcaagaagagggcacacactacggtttattggccgaccagcattcgctttacggtcaattgtggaacatccaagagaacctcgaccttgagaagcacttgaaagatgatccagaagaggtccagaagttggacaagttggagaaagagttggagaaggaggagctcactaagcagacatagacgtgtacatattaacatttagtgcgttcttcatagactaaagattatgaactaaatagcatgaagttgacctagctgtgaagtaagttcaagttttaccattaagcaaaacttctatgtagcaacataaagattattaaagtgagacaactatgagagaactcaaaagtgaactccactggtcaatccgttatctccagataaagaaactatttcctcgagaatcaatttaggaacaaaggggggtacagatgggaaaggattattgagctggttacagtcggaagagaacccttttaattggctacaaaataatggatttatcgctctcgtaattgagtataacgagcaattttcccaaaatggcaggcaaataaagtattatatgcccttcaaatgtcattttcattcggtgcgtcttgccttacatgaaatcgtgaaactcacattaccccctagttcgtaactgacaaatcgtaccatatttgcatctaatccaaagtatttcttatctaagctggacgcgccggcatactgggtctggagtgcacagcacaggaatggtgaactcaattgccgatggggtttgctcgggatataatagcagagagctagagtcacttttcttgacttcatccacagtttcctcttgtagatcagttttaaaatcctttctgaattcattcaaatttccgagaatgtgcaaacctatcgattgtcctacctgccgtacgtactatcttgaacgttgagttataagatttgttcatccagactaaatagctaagatcatgaccaatgctgatcatcgcagatcaatctgattgttcttgcaattaactgggatccttcggttgtacctgagctgacgaggaataccctaatgggtttagtaaatgtgaacgacaatctgttgaagatcttgcgagctaatataagatctcacatttacacttgtgacagaaatactaacatctgcagacggcaaaacttggatgggctgtggccaacacatcgcctacgccatgagccagtctcctaaggatgcttggtgcaaatgtgtctctgctagcggtgccgtttctgagtacccaccaaaggcaggcgacggaaagagtgcctaaccaggtatttgactttttactgtatttttcaaccgttatttggtgtagttttaactcaacaagtctagatggagttgaggggagtttgggatttggcgcaaaaaatcagggttacaccattctagcctttgcagttaataaatgtgtgtctacatggaaaagtatatagccgttgcgtagacagtagagttctagatttgcctatttctatatgtctgcaatgtgaacaaatactagatctgggatctcgtacgcgatctaatcagaaagattgcagatactacaggggtgaagaagccaagacgaagctaaaattaacctacaataacggtagcccatcaagcgaagtaatctagacaaatgtgtaaatgtgtgaatttcaatactaggcattggggagcaagcgtaaattgtgttctcaatggatttagaccagaagttggctattaccttaatccatctgcaatggctatcaatctaccgccatgtacattccagtcctcatacagaggacagaggggtgatttcgggtatactccggatctataatcgccaataccgacaggtaccagactaagctgtgcccgcctattggactggctccaactccaactccaaatagacctcggtagatttgtcgtgcatagctcggggagagcttccgccgactcaacaatagccagtcacatagataatgggagttagtacgtcaaacaaagactggcgtgtaggtaaggcgcagaggagatattgttgcgatttatcgtgcctgtaagagcccgcctatcacgggcgttgaggctagcagcagttgagtgaagaatgtagataccgcagattagaaaggggttggcgatgctagttcatattctccgcttgccagccgggcttttcggtttgttcccgctgcagaacgcacggacactagccttgctggtgagaatggtagctcaccccctaataaacgtccagtttagtgtcgtatgtggatccactccagtgtttggaattagactttacgtctctttcaagcttccaggccaattcggcgtcctgtgacgctctcaactgggagataaactatcctttaatgttaattgaggcaacttctgcctaacctaatgtccccatctctcatagagttacccaacgtaatttacttctcctatccggcaactcatttaattattctccacctcctaagacactcctgtgtctccaaatgcgcaaatcaatatatgtaccagcccgattggtaatgctatgcacgattacggtcagaggctcggatttaatgttcaccagttgctgctgtctcgactcgagcacaatacgctgttaagaaattaggaccaccaacaaggctaaagtcatctacctgcaataaaggcttcatcttgacctgaagcacctgttgaagtgctacatggtagtaagtctacttggtggagaaacccaattatgtgagttcgggatagacaaaaacccgacggttgtaacttctctgtagctttgtatatttttcagattagcatatttaaacacaaataattaagttcgtacatttgcattaaataatagtctttacattttcacatttttagcctgtacacataaaattaaataccaggtgacagagccagttgaagcattgctacggctcttgacatatattgcatcaaatatatattggcacattctccggtcttcaactatttccaatagttcgttctttatttttataaaaacctttttttcagttccctcctttatagctattgagtagcttttagatagtaaactactttcactttcactattactttcatttaattttatttcttcttagaattgctctcgatgagcctagcttcagatcaagtaccatatgactccaagactcagaaattgaggtctaaattaaagcttttcaacaaacttaatgagcagacagaagagtcacaccccttacaaaccactataagcctcaaattatccaaatccctcaacggaagtcccatcacgacgcatctgccttcgttcagttcgctaccatatgccaatactcaaacgcagaccaataatcctcctatttcagagatttattcgcacccacataaattgaatttccgacttcgctccaactcgcttcccaacttcaacaaccacttccaaagcaaactcagccgtctgaaccctcgccgtcgaccgagccaaatgtctagcaatgggcaaagttattcttcgtactcattggtccaagaaaatccaaccacaactccaagtgacttgagttccggtcattcaccgacctcttctggcgatcgtaggaaccgctacagtccttttaacagcgacgacagtgacagtattatgctggacaacgataatgacctcgattccagtcactaccagcaacaagatgcagagcttagagattttttaaaatcgccatccccaaacgttcattctagtgtgagcacaagatatttcacagcgtattctacagcatcgagcgtatccaattacaaggatgatgaacttattatgattccgccgcttcccccggccacgacccaaacttatagaccttcactttcttcaggatcgtcctttggatcgattccagaaaacgataacgacattcacgaaagcgaaaacgaaaatgagaatgtagacaatgcaatcgagatgcccattacgactgcactggttgtacgtgaaaatggaaaattaacccattgcttgtcttctacatctgttcactcgtcaatggctagcaacgtcgctgacttcaataccaacaagaaaatcagcagctcagtacaaaagcaatcaccgaagctgcaggaggaggacaacgtagatcgtttggccaactctattctcaaggtgatcaatatcgaagacaaggaaataaagtggggcatttagtacagcagcataccaactaagcaccctttatgaatttaatggtacaatacataataaaaggtatagaatacaaatacagatacagatacagattcggttgtaagaaatttaattacgaacaaacaataaattaacctagctctgctttatcgcataaggtgcatagccaggacctcaggaatatattattggttattatcaggtgccaatttaaacgaacacaaatagccagcggcagtttaaattaactacaaaaatctaccgggatttaaaattgctagctagacaaaatttgtccatttttaattaaatgttctactaaattagtgtaaaatggcataaaattcgtacaccacttggtgaggataggagagaattttcatttggcgccgatctttatactacacataatttaattcaacgcctactatgcaccacaagatgcacttcctgtttgcaaattgtgataatactgtgggtattgatattttcccaacgacaatgatactaaaaggggaacggtgccggtaccattgtccactgtgttgttctgcacgctggagtattcttcaatatgatggctttgatttggagacatgattctaaagtcgtagagcaaaaaaaaaattgctcaggtatacgaaaatctagccaatgcgcaaatgtatcatttgacgactttagctaacaatgtggctgtagatttgtggcactccaaattgacttaagcgagacggcctagccccctctctatgtaatcctaaattagtagtaaaatgtcttgaagttcaccgtctgatagcgtttgttctctatctaaatattctaatatttgatcgtctaacataattttcaaatatacaataacgtctaccccttttttcagcttcctaacttttatgtactgctgtataggggcttctatatacaagaagagattgtctgtttgattttatcctctaaatgtgcatccgccttcaagctctaagcacttgcaggaccaagtcgtcataataaccgccgatcaacaccttctcttcgttttcatcctgtaccgcttcaagcaattcttgtaaaccgtgaggaggtaacgtcgcaagtttgtccttaacaaatttttctctcaattcgacaagttcgggatcgaattgcattatggttcctaagaccatcttcgaaatgtttgaaaccgtaataccgatttgctttgaccaatcggaaccctttcttaacgaacgtaatacccactggtcgtaatggagcttataccattggaacaatttaagcttgtcttgtttggagctcttgtactggaatccaatcaagcctaactctatcattttagcatcgatgttggtcatgacaaagttcaaggtcttatgaagcaaatcgtccttgtgtacaaacgacaacgacgatactgctgtggtttgcaaatccaggttcgtaaggtcggtatgctccaaaagagaattgttggaattcttgacaaactctaagactcgcttgtagtccttctgtggggcattgtagatcattgtattgaacatggatgttgccaattgtttgggagtaaacgatttgtttattcccgaattaacgaaattcttgaataactttttgccaacttcttggaagtctgaacggtatactccaatttgaagaatggcgtttctaacttccatttctacaggatcgtagcaatgactatctttgaaagactgcaatttgtcccatccaccaattctttggaacaaagtgctaactaagttgtcaacccatacctggaactcagtatatttactgaaatgcatcaagtttgagttgattgtttctaaataggtcatcgcaacttgtaataaatcgtagtcaatgtgtgatctcttgcaaacagcttcaatgatctgtactaaagaaatgagatcttcttttgtagtgccaacacttcctaaaagctttccatagtcattgatgatggtaatcaaatcagtcagggacaccttatcaatgttctcaatgatattggcaattagttttggggaatacttgacacggtagtaaccactatggttgtggttaatattgactaattgagccaaggaaatatccaattccaaagtacggtctgtcattatgatattcaatactttcgatgagcccttgtcatctatcaccttgataaacaatgggacatgaaaaggatggtcttctaaattaacttggtctgccctcaaattgtacaaacattgatgttgttcaaataacaacttggagttgtcgtcattggtagtaacttgaaccaatggaaatccagggtatcttaaccaagaatggacgaaactctgcaagtcaatggatgtcaactcgttcaatgtattccaaatttcaaatgccttgattgacttgtactgatactttttgataagtgcgccgattccacgcaacattctcgtgtagtcatcaccctcactagctgatgttggatccccatctacatgtatgatatttccaatcattcttaataaaattatacccttctcgtaagcatgtgtatcaaaaattgtcgatgtcaaagagtttaatccggtatctattttggacatataggtattgatgcttgggattgagaacttgtcttcagcatagaagcagtcttggtcaaggaatttttcaaattctttgtcttttgggtgagagttatcagcaacgtcaagaatatagttaccgagccatgtagcgaaggattcgttcaaccacaagtatttccagtcatcaaatgtaaccaagtttcctatccattggtggacaagttcatgtgcaactatttggtcaatttgtcttaaagtggatgggctggctgtgctttcatccacaagcaattggttagaaagaacagttaccaagccccaattttccatggctccatcgtttaagaatggaatagaaacgaaatcaagcttttccaaaggatacttgacatcaagcaaactttcaagaataggaagcaatttcttcatcagtttaagagcacgaatagcatatctgctttcaccaatacttgtgtatacacgaagaggaagatcgccatatttgtcttccaagtattcaaaatcaccgattacaaatccaaatacagaaggcgcaattggaggagaagtttcaaagctgaaagtagagttttcactcatctccaatggctgattcagtagaagtttaccaactgaaattactttaaatttggatagagtagtgatggtcaacttgatcggagtcttgacgtgcaattcttcgatcaagggaaagaccaacttggcagaatgaggctggaagtgagtagaaagaatataattgttagactttcctgagacactgtccaaataattagtcttgaacaaaccatgggttttatcttggtacgttttgatgctattgatctgccccatgtacgtaatggagactttcagattagcgacatctacaatttcgacatcttctgacgaagaaagagtcacctgactgttgattctgtcgtatttaacagtaagtttgacttcagaagtggtattcaaaactgccttggtaatgactaatttggatgcatgtaaagataatgagaatttagtggatgtttgcagtctttcaacattataaacgtcgttctctttcaaaagaatgtctaattgaccttggaagtttggttttgtatggttaatgtccaatttgagttcgtataatgccggaacaaaacggttggaaaccgccaaagatggagcggactcgtcctctatagctattgattgtaacgtatgtaattgttcaaccatagctctatgagttggacatataagatctttgtttgcaagtttttcgagattcaaactgaaaaattactgctgcagagaagtgaaaactgcatacagtggatagttgtgcggtatggctttacgtttcctgtatgtatacgttaactaaagttacttttcgcagccatggaaaagttgctcgaaagaaccaacagaaagtagaattttcagcatacttcagcttttggaatacgagtcatagtttcaatttttcagagttagagttagtcatcaattttaatagaatgagtcgctgctcgtgtactgcatctatagtgtattcacatatatttagacatttacaagatcttttttcattttcaaggttgcctgtattttcttttgtaaattatccccatatatagtgtatcgaatgatattgtacccttggcatcttctattagcattcaaattaaggggaaatcctttttttttacaagaccacttgaaatacaaggcgccaatagcattctagaaagcattccatttagaaaatatatatgaacgttgagattagtcagaaagaagcaaagaggactatcaagggagaataatcagagataaggttgattcattgaagtggcggtagatgtcttggagaacttcttgtctgatagtcgctcattgaatatgccagggacttatctagatgaacacatccagtttcaacattcacccgatggaacgagctagtttaagaatttcctgaaagaacatcttagctggaagtaaaggcaaggacaacgaggcttgtccaattcgcccaattcgatgatctacatgtaattacattgaacaatccgaagaacctactctatatttccatcggaattcattcttttccaacaatatgtcaaggctatctttgaggagttcttgaatattccggtagcaaaactttgatttagggactaagtcctatttctcgccagatcctaaacgacgtgaacttgacttgctatcctggtcaagtagatagcagctttataacaatgcccggtcatatctaagaagtgaacaaattcgcagcctaatttactagacgcatactgaaaaatacagtactgacgcaccttctctggtgacgaacgatcagaatatccgaagttcagcactggatatggtttacatccccacgtcttcccatgggagacatagtcagtttttacgtgtataatccggacttctcggagttgtctattgttgccgggccaagacagtaccccataaaatcgcagaatgtcttacggtatttccggtttgagttagccggtccgaggctgaaatgtttccccaggaaatgcgggacgtcaaattttcagataaagagaatagacaatggcagaggtagatcaaaaagaaccgaagtacaataaaactcggacaatatagggtgtcgtatggtacgatagacatactgaaatatcacatccgtttgtaagttatttcgtcctgtgaagtgtttattaccgtctccctataagaatagtgtctatagccaggtttggagtgcagagaaagtcccaacagatttgaagtggtgctaaacgaagtcgagcgtagaagcctgtgatatcacggatatagacgtcgtaccagttccgagccgtagataaacggcgtacgcagcagctcagtcaaaatgaaacggagtggagagctgactccaaaatgactctctggttgaggtgaggatctcattttgtcaaggttcagctatccaaaacctgagatgcggtgcaaaacgaaaatgttgaactcgctaattcttcacgcaaaagcaatagctgggagtctgtacagtattaccgtatcacagcgaagacatattaaggaggaatagcgggctttgtatcacaacgctacccccgtccacacagccattctaccgagctgcggattttcgctgggtgtactccgagggtaatttcgtttagcaccgctcaccaatgtgtaatcactatctagtatatatagactgatatcagccgaattgtttgtcaaacaattatttacgtcttcttcgtcttgtaagttgtgtttatcacattaatggcagtcgctccagtacttcttcaccgcagcatcattttctagcgaatatattcattttcatttcgtcacattcacatcggactatcgaaaattcttcactatttttatcggccgctgtgaaaaatatactcgtactagtcaaagaaaaaagatttccaaagcttgatttttcacagaaataatccaagcaaccttttctattcttcagctctacagccacattgtcgcccacacagattgtcgccgttccccagatgggtctccttacaacggccaagaggatcgcgtccacagacgagttggacctccagaatgtcgatcccggcactattcgcattgattgttctggagcctatattggtaatgacatacttttgagagacaacctcatccaggaaaagcgcaaaaactcaatcaacggctgctatgtgtccagttctgagtcgctggctactgcaagcagctctcctactccagaagcttcttccgaagacgagaatgctgatggtgacgacgaagaggataacagctcgacttccactgcatccactgctagaatacccagagacgcctctgtagtttcgggatctggtccagcttttcgtacctctgctaaaaagaaccttcagcttgcatacaacggcctggttgtcgttgacgaggagttggaattgccttctgacgactacgacttgaccaaaaacatcactctaccacagcataacctggaaattatccatatctctgtcgatattggcggaaccctcaccaaactagtttacttcaccaaatccacagtcaatgacatcgggggtggcaaattgcacttcaaagacttccagaccgaaaacttcaaacacgaggctctaaagttcatgataaagttaatatccaaatcgtgtcatcgtgaggaacacacacctattacatacatcatggctacgggtggaggggcgcataagttttacgaactcatgacgaaaacgttccgtaagcacaaattgcccatgaagattattgccaaagatgagatggagtgccttatcaaaggattgaactggttgatcaccaagattccaaacgagatctttacctacgacttggtgcaggatgataccaagttcattgctaaatcgttgcaggaagagcaagacatattcccctacctccttgtaaatatcggtagtggggtgtcgatgatcaaggtcgttggacctggtccagagggctttgagagaataggcggttcgtctttgggtggaggaacactctgggggttactttcgttgttgaccgacgcaaaggactacaatgagatgttggagatggcgcagcgaggcgataacgagaacatcgacttgttggtgggtgatatttatggcacaaattacaacaaaatcggcttgaaagcaaacaacattgcatcttcgtttgccaaagtgttcaaaaagttgagattcactaacggacgtaaactcacgccagcagaaaagttggcccagttccgttctgaagacatagctcgttcgctcttatactctgtatctaacaacattggccagattgcctacttacaagctcttcggttcaatctcaaacgtatctactttggtggaagctacatctccggtcacaaacagaccatccacaccttgagctatgccgttaatttctggtctaaaggagacatgcaatcatactttttgagacacgaaggctacttaggcagtgtgggagcattcatgatgggcccaaaccacgaaagcagtttacaggaaaaatagagatgactaacgactagatgtatttatttatggtattctatattctatgagtattgtaaggagatgtagcaaatagaggtagtatagagaaatagtaaagaagaaagaatatagatataatatagagaaacaagtaagaagacgtagaaaccagtattgtagcctctgaggtttttatcgcagggtgcaaatttctgtaaccttatcgcgctttgcgctatttccatgagataacacaaagaagtctggagtatagaagatggactagatcgatgacaagaaaagaaggtagataaggtatagacgaagggggtggttgagcatgtggtgatccactatttgaattatagtagcgtagttgaaaaatgaaaaagcatttccaggcgtggtactcggtatttcttctgcagtaagaagtagttcaaaatagcggaaattttgaaagtcatatgaattttgtgcctgggaactgaaagtaatggggcatctctgactggctgtactcgtctgtagtaggagatcttgtctaatgagaaaactcgcagtatctcaacttatctgcttgatttgtactgcttctgtccatctcatctcgtccctggttagcttctgtcacatttcttgttgtgcaacgttccatggcagttccatttaggtagtatttttctgtaccgagtctgctttatgtaacgagaatagcgaggattaatactgaggcaaccatggcccattctaatttaattatttctaccttggttaatcttgcttgtttcagaataccattaactgtggcatccacaccgtggatcaacatgacctctctttcacgactggatacctcagagaagtcatcctcttgtcggatatctactgggtattcggtacggcggggacttctttctaccgatgactctcactaaatccaccacggtgcagtgacactccgcactgcagtttggccgtggtaccaacattgtgttgcagttcgttttagcgacgcctacataaaaatttttaatgatttccgtttccaccataaacgtttatttcttcttttctgtataaataccgctgtagttcccccacaaccgcattgatgctggaccatgaatgatatccaggcgaattaccagcagcagccgactcctccccataactcctccctacccacgtcgttgaagtctcaggcctcttcgctttcccagtcgcacgtacaaaatcacaatcacaatcttgaacaaaacaatcaattccataaccaacaatacaccaaccaaacacagcttccaccacaacaacaagcttacaacaaccgtacagaccccagcagctaccaatatcaacaacagcagaatcttcagtctcaatcccaagcacaaacgaaaaagatcctgcccactattatacccataagccaaccccactatctctaccccagccaatctcagctgctctattcttacaactccgagtggatcgatacgcctaataactcgccgtccatcagaaatagatacctcaatctcgaaatgtcgtcaacccaagtcgccacagctgatcaagccaagtttgaaactccgtacaagacccgaggtgcatttgcctacatttctcccgtggcagacaagcaaggttccaatgccatgaatctttctacgatagagccagcctctgtagggatcgtcgatacagcacaaatagacgttcagaaactgtttattgaaaagctggttacccctcaagtacagcaattaccccctaaaacagtaaaaacatgggacatattctgggccatgttgaacgacatagtcggcaaggataagatggccaaaatcgggcagtacaccttgcggttattgatttaccatgctgagaaaacagaaacgtatctcagcaacccttccatcaacatcggcatcattaatgctcgctacaataacaaagaaaaacagttgaacttgatttcaaacttcctcaaacacccatcggactttattagaatcattgtaatactagtgtgttcgcttttccgtgagcgatttgctggtatggtatctggcttatctatgtatagacagtttttgcgtttcggtaaaactcctttcagaataagaggattagccaacaagttgtcaagcaatatcacctacaagaataacgacgtcaagattaactaccccaacataatgaatagaaagacgttaggtgaggtgttttcgttgtattacggaatcaacgacgaatccttgctcttgtacaaattgaaattcttgtctaatgagtcgtaccacaagtttgtactgcgtcacgaatcctttggttggtactctgaaacatggttagctctctataatgcatacgagaacttgcagaacttaacacaacaggaaatggacgtaaagatactgatacaggtcaaaagcaaagccaaactcttatctaaacaattacttggaagtggagctggtgctggcaattcactccagaacaagtttgatttctcgtcagtatcttcttcttccaatgaggacgcaaaagttttgctggatatccagttcaagaagaacaatgcctggttggatatctacaagaacatcagtgacttgatctttaatacctatactgttttcagattgccacttcctttcgacacgattcaaatatggatgggaataagtgcatcggtgttgagcacagtcaaattgtaccgcgaaacaaaaaagaagatgatagagaaagcgtaaactgtcgtagtataattgcaatatgctatgattgaaagtactataataatagtatgcattgataatgataatgatatgatctcattctataatccactatactaaatatcatatgatatcatattatcttcttatcatactataatgataatgctataattcaataatcatacctgacttaatatacactttagagctattgtaaaacttcatccaaggtaatatcattaggcacctcagccgccagtttccagaacttcagcaaatgtctagcccccagatcacatgcgatcactacaattttttgacctggtccattcttcaatgctgtcttcacggctgcaacacagtttatagcagcagacgaaccccagaatagcccatcgttgatacacaagaactttgccatacgaagtgcctgattgtctgacacccttatagcctctgtaatatgggcttcggcctgtttgaagttccatgtaagtctgttaagaccaataccttccactaacgtgtctacctggtgtcgacgtctagttccttctttctctacagtatcgtacataactccgtagttgactctgttggccaatcccgagccctggggatctgctagtatgatctttatctctctattctgctcgtgtaagtatttagatactccagctatagtacctccagttccggagccattgataaacacatctacgtcttgttccatctggcgccagatctctgggcccgttgtctcgtaatgtattctccagttaaaatcgttctcaaactggtccgcaaagatggccctgcgcctgtcgttagggtcttcgttgatctgctgtgagccacaccgtgctgcattggtatactgctgtgggtctacaatggaagccggtttgactggatgaatggtagcgccgagtgacttgaggagttgcaatttttcaggagaagtgtcatctgggaggcatatgtgagcatcatatccgagagcgttggcgagtacagcgaaggagatgccagtggaaccagaagtaccttcaaagataacgtccccggagtgtgggcgaaggtgtccgagtttttcgttggcccggatgatagccaaagcgacacgatctttggcggagccagcaggattagcgagttcgagcttcgcgtagattttgcagccggttagtttagaaagagacttgatttctatgagcggagtgtttcctatgagggactctactcctcttgagcgaggagggagagatgtaagttttgttgaagaattgttcgattgcgagagctggcgatggagttcacgtagaattataagcgctgaaactatagaagctgatgactgaagtataattttccagttgaaactcatcttcaggaatcactctatatttttgctattaattttgttgtagaaagcttacagccttgaaattgaaatcaaggtgttgtagaatcgaataacttgagttggtgaaaagtttctgtgcaggagacttaattgtggagatgagatagacagtaggaatggagaactagctagaggagaaacaggtagaactacgcagaaagaattgggtatcaagctgtgttgcttcatgtatgagggaaatggatggtcggcaatttcaatagtttcgcagctattatttgcattttggccgggtaaacggttgttaccttgctttcattttgtccgcaattaaagactgcgatttgcaatcgattcccgaaaagtatcaaattagaagatattcgtagacacaggtgacactatttcgattcaaatgctcttaacctgattcctgttggagttaaaacgtaaagcagactcatatttgaatctgaaaaatctcccgatttgacaaactggtttgtgacacctccaaacttgggcgacacaaagcagcgccagatgccaaattcagtggagcaatgattcagaatcaagacgtcgcttctgtgcagcgttctttcttctccagagaggggaagatagctatcgtgtaggtatcgtgtacaactctagctgctctcggcgaaatggaacttgtctcctccgttgggagatagacaatcggccgcagaaatcaaaatgttggcgtagggtgggcaggttctttttgggcatttgaggagattctccttgttttacaagtgtatgtatctaaaagtaacggagttcaactgccaaacggtctcggaggtattgcggagtgccggtcgtatggagaaaagactattagcgccggatatagctggcgcttaaggtagtgcgatttgcgacatactttcagagcgcaacacgtaggactaaaatgcagaaacttcggagcgttggttgtggcccatgaagtataggaagattatgtagaagtgttggtagctatagcgttgaaataatgtatggcggttgactggtggcttgatgatgttaaatgagattgcgactgggactgagttaattaattattattgaaatttaggaaggtaatcttaacgtcgatgctaaaaaataaaccaactttcgctaattttgcatgtctgctactgtagaaaaggttggggaaattaggaattatagaaaaggggtgcagaacacacggagaaggattcaatataagctattcagattcgagagatagctcacgactagagatagctcatgaatagagatagctcatgattagtaatagccgttggtattatttggccgggattgtggggcagttgaatagaaaaatatactatatagacagccgccataatgtagaatcttctggcactccgggattcacggtgaagcaaaacgtcgaagacttaaaagttgtactgacttgggaccttccagacatggacctacctctaatccataaccaattatgatttatatgatccatacaccaacgtgtatgtgtctacatgtatcgatagtgtgaattttcatattatctgtaaaatacaattaaattgatctcttgttcaataataaacggcaatcaatataccatatatatattggcatacatccgtaggaaatttctaatccttttgttcaactcgtcagcccatcctcgttctagccactgtaacctgagagttgcaacatcctccgcccgcattgttcgttctgcagtgtcccacaaaatttttatgcgataggtagtggaaaagtcttgagttacaaaaaaaagatcactacttaagaattcaatcgcactctactcaccacttgactcaagactattttggaattcttctattgtcttttatagtgtgataatccgctctttttcagttttctcttatcatctcttttctgattacgaatcagtcatcagctgacagctcccaagtgtagtgaaacgtgttggaagccccaccacaagccgagtgtaatttccaggcaatacatttcacttcctctctgaaaaactgagacttcgccaattaacccgtttctgaaatacatagcaatttcagactaatttcccagcacatcatttcagctgtagctgtccaccatgtcacccaaagtcaagtccgaagccattaccgacgagcaggactcggcagttactgctcgcatttcttcggtatcgatgctgactacaaactcgtcagaagggtcgagaaaatccaccacgggcaaaaacgggaacggcttaaccaaacaagagtcggcagatgaaatagatgaagatgaagtcgaaaacgaacaggaccaggacaacgatatcgagaacgatactgaaaatgttgctgccccgggtccaggctctgaagctaacattaatgaagactccgattccaagtctggaaagaaaaaacaaaaacctcttgaaaagcctaaggccttcaccatcaagtacaaaagacccagaggaagcagagcatgtacagtttgtcgttcaagaaaagtcagatgcgatgcggaaatacatatcccatgtaccaactgtatcacctttgggtgtgactgtgtgctaccagaagtgaaaaagagaggtaactcatcgcaggactccaaacccaaacgaagacagaccgtgtcaatttctagcaaagataagattactgtaaatgacgaacacgaccactcttctgctagcgacatcaacaacgggtcgaatagccaaccttcggcttcattagaaaagccatctgacacttcatcttctgcaacttctggagcttcgtcaaacgaaccgattctaaacatctccagcgtcagcattcctccgtcgttaacgtcaacctataagacacgtccatctatacataagcgagagcttgtcagttccaataaccgtgctgccttgacctttttgggctcatcctctgttggagtcgtcgtccagagggttggggaaaatcatgtccagttgacctctgacatttatgacttcacagacaattccatggatgcagtagaattggaaatccttaagttgagaggtgctttcttattgccttcttttgaattgcagcttgacttgatcaactcgtattttgaacatgtccatccgttgatgccagtgctcaacaggacacagttcatgtacaagttcaatgatcccaacgataatccctcgctaatgttgcttcaggcggtgttactttgtggctgtagggtttcccgtaatccccttctttttgactccaaagggtccagcgaccttgcagctttgacattttttagaagagctaaatcattatatgaagcaaattacgaaagcgatccagtttcggtcgttcaaaccttgatcttgattggttcgtactgggaaggaccagaagatgtcacgaagaactcgttctactggacccgtgtagctgtgggtttggcacaaggttttggtttccagagagatgttaacaactcgaagaacttgaccacttctgaaaagaaaatatggaggaggatttggtggtgtcttttcgaaaaggatcgtaatgtggcaattgcttttggacgaccttctgttattgatttgaatgattgtgatgtgcctatgcttactcttgatgatttcaacgaagacgaccctgaattagaaattaagtcgccatatcctgtaaatgagaccgaagcactttattttattcacttggttaaacttgcggaaatcaccggaatcatcattaggcaccagtacagtgtcaagtcggaacaattgaagagaaagaataagttctccatcatccaacactgtgacatgttgatgggtatatggttcaccaacttacctccccagttggttttctccttgacagatcagtctactcagaacttctactcttgtttgttgaacgcgcagtattacaacagattatatcttattcatcgttccaacttgatacgaatggccaaatcttcgtctactgaccccaacaactataaatatccatcttggggtatttctttccagtctgccagaatgatttccatcatctccaagattcttcttgacggcgatcagataaagtactgtccagtaatgtatgtgtacattgctttcagtgcgttggtgatgttgatctaccatgttgactcttccaatagtgttattgcctctactgcttctgattcgttgtttgtttccagagctgttcttcgtgaattagcaggttactggcccgttgctggcgtcttgatgaagttctttgacaagtatgccaacgacaagatcaaaagagctaaggttattgaaaatggaactagaatagctgagttccaggaattgcatgcgaatcagaacgaccaaaaaaatggtaagggttactttgaacacgtatcgaataataacgcagcaattaagaaggaaggtccttatcttacaggaaactctccttcaggagtttctgctacttcaggggtctcacccggaggagaaatctataacgattatcaaaaagcacagtatgttgggcaacagaacgattcccgagtttctcatgcacagcctgttccacagaagaatccaaacattgacgaattggttcaacagtacaagcagaaagatacctcggcccagaagcttcaaaaagacaaaacggttgatacatcgcctgcttcatctacgcagtcgtttccaaatatatcattagttactgaaaaattgccagccaaccacaatttttttgagaacttcgagcccactcagttgttccctgatattagatatagttacccacctactcgcgttcattcccctagtgctgaagcatctgcagagcctattggtagcaacgtctatgccagtagtggtggaatagacgtgagacatcgccctactaatgatgggtctgacgttgttgatgaagcttatccttcgactaccccaggagcttcctcgtacactaattttatcgatagctcgttcatcaacatgaacttgcaatcaggtattgaaaacagctctttgacagacgacatagcatctttgttcaacttgaagtactaacgatagtgctcaatattgactagaatgccgttgaagtcgataccacttctccaacacattttgttggtattttgtaatagtataactgtccataccatatatttgtaataagtacaatgcaacatctattatataagtatgtaagctgatgtatctatagtataagttcagttccagattcctttctttttatatttcttcgtgaccttaaccttcttcaagttgtcaaggatttcgtcacgacggagcttctgactgtaaccaatgtgattttggaccacggactcatatatttcgaaatctttggtaagctgcagaagatggtgagaccacacagaagccaaaatgatcaagtcgttatagttttcttcaaattgagccaacttcttgctcaacacatcttcatgctgattttcttcaagaaattgacgtgaagaattgttcaaattatctgtttctacctttgacaagaaatcgcgggtattcgctatcaattccagcataccatcggggctgatgtgcaacgtctcgaattcgggaatattgaaaccttcccacgaaatatccagagtagagatggatttacgacgtccagcgttgacttctactttgagagtgttactattactattgtgtttgttattgttctgattgttggcgtcagaagttgaatttgctggtgtagcaagctcatcaaggttgatcggtattcccaacgagatcaataaattgtgacgtatcttcagcttgacccaattggggggacgtaaatggggcattgtggataattgagagaagatttgtgcagagcgttcagagagaagatcatttatggtagaagttgtctgatgatgactttctttagtatctggaaacacttgatttagtacacttgagagtttcgatgtgaaagcttgcttatcttcaaaatcatcttcgcggaactgaacaaaactcttttctgtatattctgttgagatttgcgtagactgtggtgacgtctcgttggttggtaggttgatgtcgctgtcttcattggtttggaaatcttcaaacgaagcttcgtcaaaagagccgaaatcgctgtctgactcaagatcttcatattctactttttttagttctatttcatcttgattttgttgctgctcttcttcttggtgttctataggttgttctgcttgatcttgtatacgttgctctgtttgttccgttcgttcggattgttcagagtcaatgtcaacattttcttctaaattttctctgccttcttcatgttctatgctttctggggtctcttctacactttcgaattcgtcattgctcatattgctgttgtagcgagaaagaatatatggtgtagtaaatgaatataaaatatgtatatatttcattagtcgcacagaaattactcagacattctcttttctggaatagctaattagacaaataggaatttcagatttacctacaagttatatagaaataggaatagtagcttggataatgcagttggttttcttctctgtggggaatcccggagccatgaatagacactccactgggcatttcatcttgaaacatctagtggagtactttagtgctaaacagcttgtgcgaagaggagattattccgtaacaagaactaatgactacagtgtcgttttggttaaatccaatacgtatatgaacgagtctgggcgaggttttcgacaatttgtagacaacgaggactttcagcccagtcagagtattgtcgtgattctctacgatgactttgataataagttgggaaaagtaaagctatctgagttgaagaagaacgaatcgcataatggtattggagatatactgcgagctcttcatgggataaagtcagacgtcaaaatatacaagttgggaatcggaataggacccaaaccttctaaagccagtggtgctatcgtcagtaattgggtcctatctaagtttaccgatgaagagttaaccattctacgggaaactagttttaatttggtaaccaagtatgtggatgagatctacgagaataacgcagtaggagactgtaacttgttgaatcagaagattgcacaagcattaccgtagactaaatctcaaggacttggatactctttctgtctctcataaaatagacatcataggatatacatagaattttgcaatcaaatactattgtcattattcagtacaattcattataaaagtgtcattattataactattctattctagaaaacggtgtttctccttgatttttttttaggactgccatttccgaaaatgctatcgaggaaactactatcctgattctgatcagtgctgccactgtcgctataaacctcgctgggactaagatcatattcttgttcgtccatcttctcgatttcttgaatctcttcttccgatacactgagacgtctctggaactcaatttcattgtctgtttcatctccttcaaaatcgtcatactcttcatcatcattatcatcttcatactctgcatcgtgaacttcgaagtcgcttcccttttcaagaccttcagaagacgacctagtgatctcatttgataacttagcaacagctctacctctctctatggctctctcgatactgtttctgtgcttgatgaacaaaagtcttgggaacatacttctttgtcccttaatgatcatttcctccaattgctcttcagtaggatcgctcaagatataccagaagtccttgattctgattctgggccaaacagttatggcaccagaaaaggtctgcaaccagatattcagccagtcttgttccatgacgtgaggtaacaaatccaatgatttgattatctggagccatttcttgatctcaagcttgagcacctgttccaatgcagcagcaatgaaacctcctctcaaaacagcataacgttcgttctttgtctttcgacgaggaatcgaaacaggtcttccaacacttccttttggtgcaaagaaaaacaatgcaatatggggattaacctgggaaacaatggggaaattgacattatagtaggtgttgagagagtccacgggaatatcagttctcaacgagccatctctccatttgctacccaaggaaaatggcacaatttcgtcgctcttgggattcttggtcatcaagactacggggttcaagatacctggaaccgcagaagacgctaacaacgacgaccaaatgatacagtttggtgaagttatattgttgcaaagaattacaggtgagtgagggtcggctgggacagtagagatattcaactttctaccagttcttttgtaggcatcctggaaagtcaaggaacctctggtgaagaaacatgacttgcgggcccaagtcacggcatcgaatctggctcctgtcttccaccatctgggaatccagacattccaaggatcttcacatgctgtgatctttctagcaagctgtggaacgagaagctctcgtaactcatcgtcagttctacaacatgtcaacgctgctaccaatccacctcctgaagttcctgagataatcgaaggaagtaaatcgttatccaacatagctttgactatgccaaagtgtatatacgaaaaacacgctcccccactcaaacagagcgcagacttgccatagttcttcagaacaatgcggaaaaacttgcgcttttgagcggttgtaatattgggcgaatcggtgactttgtttatgctatctaccacttctttatagtactgttctactaggtctttggaaccgtagtatcggtgagaatataactgttcgttttcaataccggcaaagttcttcttcaagcacccttggaggagaactaataagtcttcgtcgttgttttctttcttcaacgccttcatacgcaaaatggatagcttaagagttctgtagtcgtagtatgaaaaacgaggatttatagaccatttgtccaagcccaagtacttgtccaactcgacagcgttgtttatccattcatcgtaggtccttgaagctctcaacttgtcacgaagctttttacgggctccggtccatgtgaagaagtactccagaagagctacgtacactcgaatgctgagatacaatatgcagaggaaacccatccagagtcctacaaagaagagaatgggccagcggagaagggtatatgacgcagatgatctgaactcgtctcgtaatttagagatagctgacttcagactggtgcggtggtatttcttgtggttcagagtcgaataggtatctccaatactgtttgttatgggataccagtcacttttggatgtgatcaaatcgggtttgatctggttaagtctcgaaaccaacagatcggcatctagatggttctgatcgtatagctccgaaaattgaggcactttctcatctgttatcagggctgttctcagaatgctatttgcagaacgcacgttgggagtcatctcgagcaaatccaccagctcttcccacacgagagctttggcaaacgaatggatatggtcctcgttgatgtaatctttatctagctcagatagtacggacatgttggctgatgtgaaagtatgatgtgaaacgtcggattatatggaaagaaatatgctatgaatcaaatgtatcttgagtgctttatgaaactctatgtgatgttgttaagtcaagcaaacaatactggagccaaacatttgtgtacaatacactggttcaattgtatagacaaaaaatgatacgataaagttacagcgatactgtagtagaaaccaactgcttcagatgtaggcaaatgtttgagatacacgaaaatgaacaggtttaatttcactaaatgaaaaaagcatcccagcagtatttatatatattcaagttcacagtctctccatatatatctgatgactttcagtgcgcatatacttctgttgggctgttactctttttgcgcccgaggctctcacatgaccggtgccccaaagtgatttatgccgtttgcggagatgaaatagcgtttttcaattttgttggactgatttcttcgctagttaagacgacttttcactacggcagatacttttcggaattgtacatgagccaattttgtgatgtagtagtcttaattatactgcttctaatgtaacattctttgtagccctggaatcttatctggtggttggtgttagatgcagtattctattgataaagaaagtaaatctttcagttttctaagaataagtgaaaatgttatgaacttcttgaacaaaaattcacaacagggtgcataacattccagtattttcacatctactgtagcttcgcttcacttcacttctagggataatcacgttcatgtagattacactagcctgtttcaatgtaattctttgtatgcagtatgtgtcttagaggagctgatatggaagttgaagagcaacgtttggagatgtagtctccaataatatgtgatccacatataatataggcggtttatgtcgtactatcttgaggttcgtagtttcttgacattaatattctgacacaagtgttgacattgtcgacctgctaagcaattgtagaaaaccatgtgatcctgtatatgccggatttttcacggttaattagcagtgaaatatgtcaatatcagaaacgtttcttaatttagttgagtctgtcccccaaacggcagcatggctattgatactgttgttctcgacatcgagggcactgtttgtcctattacatttgtgaaggaaaagctttttccgtattttttggagaagttaccgctgtttttgctggaaatctcgaatttcacactgctccaggcagacgacaaagaccctataaaagccattttgagccaattgcccgagcaaataagaacttcaaaggattctgtgttggagtactttaacgatttggttcgtagagatatcaaggatccaatcttgaaacaattgcagggattcatttggaaattgggctatgaaaatggagacttgaaagctccagtatatgaagactcaattgaattcatcaagacatttccttccaagactgaaaacaaaagaatatatatctattctagtggaagtatcaaggctcagatattgttgtttggctatgttgacgagaatggtaagtctgtggatttgaatgaatacttatcgggctacttcgacatcacgactgccgggttcaagactcaatccagttcttataccaagatcttggaggatattggtaaggagcacggtggttcggtgttgtttttaagtgataatgtgttggaagtggaagccgctttagaagcaggaatggagagttatgttgttgtcagaccaggcaatgctccattaactgaggatgataaaacgaaatacaaaattattacgtctctagagcaattgtaaatgttaaatggataaatgatagaatagataatgttgtagataaatcggaataagatcatagactcagtcaaaactggagatagacttgtagaaagtacatggactctctctcaaaggaacaggataatacaagaaatatatattcatattggacaatacctagcataagatatccaataaatagtctacagataacacaggcttgctcctttctacaatcattttcttatgactattatggaactaatgtacatacagcaatactgacagtgataaaccactttttacatatctctaaataagatgtcagcagctacttcctcgttcttgtcgcaggccaaataaacctggatcaccaagtcacgttcaaagcccaactcgcacaatctttcaattgcattctggtcttgttctgtcaagggaatacgaattggctgttggccggtagcgtcagctccttcagctccgtcatcgccttctatttcgtatcccaattcgtcggcaccagctcccaaaaatgttctgataaacgcttctgggtcttgctgaatcaaagtagcgattcggggattggacagggccaattgttccaaaataggctggatcaactcggggtttgattgcaacgatgctctcaacaagttcatctgttcatcgtcgcccatttccgctaatcctccaccagttgccggttgttctacggcaccagccccttggcttctggcctgggcggctgcggcagcttcaaacaagttttcaccctgttcttcgccatcgtcaatgtcgtgatcctgcgccaactcttcgtgagttgagtcagctacaggagctacggcggctggcacttccggacgttgcaaagattgcggaattccagtcaagagatactctacggctctatgaggattgttgaaagctgctctcaatgcattttcaacttcggctctttgatatcccatttccataatgttctgaatgctagcttcgcgctctgagccttgggcaaaagtagaacttggttccgaagttgtagaagattctggtgcagctgcttctggttctggtgcatttccagaagaaataccagagtcggtagaaccctcagcattaccagtagtagtggtggcagtggtagatccaggggtggcagatgactgttcggaagatgttgtcgtaattggcgcagcagcaggagcaggcgtaggagtctttttagccttggatatcatgaaaatgatcgagtcgccttccttgatcttaaactcctccaaagtcttttcgtccagtaacactttaccggagtagacgaactttaattgcggggcttcgcagtccttttcggcagcgagtttttccttggtcgccaacacctgaagagcgttagtaaaagcaactattattgacattgacaactaccgaaagttgaaataaattaacaaatgaagattttcatttaatgcgctgatataatcgcgttggtgttagatattttatatttgataaaatttggaagcaaattatgagtctttataaaaccattcatttaataagtaatttgaatccctatatcagccaatcctcaatctaaccaaccaaattgtgttcctctcaacgaaatattcacgtctctctgcaaaatttcagtaagtctctatctttcatatacatacagtgtcggtcaactcgacctccaagggcactttctgtttcttgaaatccttgaaaatcacttgcattacgaaaacagtgcacggggtcaattcaacggtggtatacggaaacggtctagatgttatcgcagctcttctgctggaagaatggatgaggctgttgataaatggttaaatcaaagtctgtctgtggcgacgagattgatttggtcgtgtcgatgtgtcaacatgtgtgcaggagcaacctggtaattatatgaatctggcaagagtgagatcgctagtacaattattagaaagtatgaaactacgctttctgtatattgtcaagtacaaggagaattgtaaaggtgatacatacgacttagattgcggagctggttttatgtgctgatttttttgctgtttgcttaaactgtattgagtgagcagctctaatcgtctacgcctaattagatcagacaatttgctataagctccggtgaaatttcgtgcacttttcattggaatctttgacgagacataaaaatggatctggacataccaaatagaggatattattatgattctacttgactcaattgcatccatatccgtagcagctttacctctgtccttcggtacaatctgaagtatatgttgcatatcttttcaacttatctctcgtgactatactcacatgactggatgtgaaaaattgagtataacctcattagataagatcacttttacctcttcttccactatttcaagtgtttgtcaattttcactcgtatgcctccaaaatgtccagaagaagcagaggtagttcgggggtacggggtcccaactcggcgttaacagctttcctccagaacgagggtatcacggacgcgttccgtgagagacgtgagcgagaactattccaaacagcccaggagccaacaacggttgtagaagtagttgaagaacaaactactacttcgttatcttcattatctgcaagagcgtcgcgtgtatctaggagactcagagcagcactacaagaagaacaagaagaagaccctgaagttgaggaaatcaagaaggcagccaggcgtaagagaagggctgcgaaacgggacagtgacgatgacgatgacgatatagacgatctcgacttcagtgatattgatgaacttgaagataacgtcaagaaatttggggaagaagacacttgtgtagactgtggaaacacattccacttaaccgtgtactcgcgttacttaaaggatctgaaaggttacgtttgtgaagaatgtaacgaaatcatcaaagaaagagaacgtaaagcccgcgccaatcagcaaactgctcgtaaacgtagaaagaaagttgcgcaagcgttgttgaacaagactgtggttagaatcccaaagcttcaggacatttgtatcaagaagatttcagacaacatcaacgatgtcgacgtcttgggcgatattggccagatcaacttgaacaagctctccaaaattttgtccaagaaccgttcacttaacaacaatacaatgtcattgttcttgtcgcctgagttgaagtcattggaattctgggactgtctggacgtcgattctgattcgttaaataagatcgcttcgtattgcccaaacctagaatcgcttactttattcatgtgtggtcagcttcacaacgataacttaaagtattacaactcaaatctcaagaagttgacagacatttccttaaatgggccattcttgattagcgaagctatgtggcaggagttctttgatgaaagtgacaaccgtataaccaaattcgaagtgagaaacacccatagatttggaaacgattcgttgatcagtcttttggaatcttcaggtaagcggttgacctcattgaagctttcaaggctagacggacttgactcttctgcagtgtatgacttaattccccactatatccagacgtctacattaactgacctcgagctctcgtatccaaataaagaggatttaataacagacgagcttctcattaatatccttgcaatctctggagaatcgttggtgtctctaaatgtagatgggtgtactggcttaaccgatgctttcttgattgatggtgtttccaagttctgtcctaacttgacccatctctcaatggtgggtttggatcaaatcacagatgacggttttgccctggcttttgaagagtactcaaaggttaatggaggtggtttgctaaatgtaaatctttgtaaggtcactggtcttggtgataaagctgtctatgctttgttcaagaactcttgcagtactttagtcgagttgaatctcaactcactctacaaactttccaaagagtttttgtaccaagtatttactgatgatcacaatgtttacaaaaagaaattgcaacaccgtatagataatggcgagtcaagtggtgagaccgaaccaccattggtattgtataaccaaacaagattgacattgttgacaactctcgacattgggtttgttcgagctgtggacgacgaaatacttaaattgatcggtgagagttgtcctaaactatctgtcctagaagtttacggagacaacagatgcacatcaagggcaaagttcagagagggtttaatggttattggtcgtcaaaatgatgaaatttgaataggtatttagtatttgttatgtacatttaatccatgactatattttggtttatcattcaacatactactacagtttaagttgatgatttatgcttttggatagttgatcgatgcattcgccttttcggcatttttaaatgttggaaacgaaggtacaacaagctttgagtctagcaaagaaacatcgtttccttccttcatgaacttgttggttatatcaggaatagcatcgatcaatattcctggatggccaatgtgctttctggtgatctttaaaagctctgcttccctgttgaaatttgtcttgtgagcagacttcaaatcttcagcgtctttaacaatataattagaattggctagcctttttctggcggaggcattacgaattaaggaaagtgacgtttccatatccttctttattaaatcttctaatgatgatctagggactcctgctctatgctgttcaacagccgagtccaaatttgcgccaatgatatcatattcgattgtgatgaaagcatctacaatagctttgggaagttgagtttcagttttgacataatttattatcattctcaagttgtgaagggtttgtccgtgtaatctttcaaaattcaagaagtatttccaaaacaaaacagattttttgaaagcattttctttgtataataaattgaacatttccctaattctcgatactgaatctgtctgagcatacaattccttcaaatacgcaacagtgattatagtgatagcttcatcattaagcaaattcaaaacaaacaacgcatctgcagattcaccttttactcccttgctatccttttttattgactttgcattgtgtaaagagaaatattcgtcaacaatagtctgcaattttgcaaggtaatctttgctattctctgatttctcccaaacctctactgtgtcttggactgtttgtagatactgcagtttgaagtatctatttccacgacctccaaacaacttcaaataatcgtataagtagctcttggcaatgtctaaatgcttgtacttcataagaaacttcgggtacaaagatctaagaacagtactttctactggtaaacctgaaattgctcttaggtaaatagctttagctttctcgtatttgacttcatcttccaattccaggatgttgataaaagcaagatacttgagccatattccttcattgtaatagttgggtactagtgctctctcaaaaatatttgctacattatcaaattgatctatggccaggcttactttatacttggaaatctcgtgatccaagtacttgatccatatttccttttccttcgcaatttcgtcgagcctgtcaagagagaaatcatgaatgaatatagacgactcatgagaccatttatcagtcacctgttcttgagtcgatgtaaagataatgtcagtgtgatcatctacaacttgattcttttcaccaagagtcaattcagtaacatctgtcttgttgaatcttttcacatattcagccaactcaagagaaggtatcacatccgtaatatcgtaattcttattgatttgtgtaaagctattgtagtattgagcatactgataaagtggaatcttggtgactctgagatataatcctactataactgatttttcgccaattccagtttcaaattcaatcactttatcccataatggatgagatagaaaatttaatccatttaaacgaagtgcctcactatattgggctctgataaaactcaacttctctggatcgttcccatatgttaagatcaaagcactgatatagtctgtccataattcaaccgaataaggaaatccaattacagacttctctagtacctcgattgactctttggtaccactgagtttgaatgcaaaaatcagccatgatttccagtaagaagccaaatatggaaatctagaaagtaatgaagcatatgtttttgtcactaagagcttgaattgggtcgaaactttgtcaggcttgccttcaaatttcactgtgaatgtcctctcaaacagctgaaagagcttatcccatttggtgagatcattggggctccttcgaatatcattatggagcttgtctaagttgtctacttctttgacttctgcatcagatttggaagctccgccaaaggaaattgcgtctaaattcaaatcttggtggaacctaaaatttatatgggacatcttggactataatttgctaacattcaacgtcttgattggtatattgagtaaattgaatgttacaatacatttacatctccatagtgaaaaatgtataaggtaaatgtcgcaccaatctcatctatgtcgctaaatcagatttccagtatagacatttttaactatgatttaaaatgaatattttctccaagtgatcttctaatcttggtcagaaacagtcgtcttcaagatggttgcaattcttcctgactctataacagcggaaactgctccctattttcttccagaatcgaataattccaaattgttggagttcttgaaaccacttcccttttccactataaagtctcagtccataccagctgtagttggaacccaagttccagttttcaagtcgattgatgtttcaaatctcatagaaaagaccagtaatcgcttgatatggcaaactgcatcagaaagacgtcgtgacgatgctcggtcaactagtgaagaattggaaaatccagaaaacgaaatagaagaagaccctcagcattttgtagagattcaagaattgctacccaaatcattaaaggaccagttgagtttagtggtagttgataatttccccaatgtcaagcaatatgccatagagaagatagtagattctttggtggataccagaaagtataaatggtcccacgttcattacgaattcgctgacaacagactggtctacatacggtttgaacacgtaccagacgctaaatggtttgttgatacatattcactggtattgcctgatattcttctgaacaagaacataaaagtaatccataacaatcacatagatgaagttctcgatgaattgagtgattttaaagcagacccaaaatctactgtaaatagcaaagtcgtttcaaaaatcggttcaattttgaagaacaagagaaattttgaacgaatttcaaaaagatctggaactgaagatttggatgaagttcttgcttactacagcaagtatgaggtagatagtaacgatctcatcgatgtacctacaaacatgagggaagctatagtaaaagacatagtgagattcagatccaaagtgctacttatagaaagagacaatcggaaaaaggaaatcgaattagagcgggaaaagaccaaggatagattgaagaagttgttcgctggtctaaaggaaacgaacgatgatataaatatggactcagaaactacaaaagatttaccttcaaatatcgtaaatgaatacgatgatctcagtgatgatgagtatgaagaattacttaagactggagaaaaaaagaaacttgacaagttgtatcaagacaagagccaccaacttcaaagtcttgaaacaagagaaaggttgtatttgacgaaaaaattggaggacttgaataactatgaagatgatttgatcaataacaaaattaagtatattgaggatttcaagaatattgaggaatctacaaattccaacaacaatgacatttcatctttggtcagtttgtacttcaataatcatgcacaatacttaaaggtcaggaaccacaagcgaagtgcggaagaagctcttgatgccaaggatgaggatgacgaaaagaaggaagagctttccaccaagtcacaagacttcgtgctgttgaaaaaagccaaaaacaccttagaaaaagatactgaagacgcagttccagttgcggataacgcggaatctgaaactgaaccttccagaattgaagttgatgttagtattgccaaattgtcaaaagagcagactagtaagttgcagagtaagattgtggaattggtggaggaatatcttggtattgtagacgagttcctcgtggaagtgatcaatgagaatttgaacaaacacaatctctctgctaaggacgagctcatggaagaattatctgaagttcttgatgatgactcggcgaacttggtcaatgacttatggaactacgtgtcgactattgcaatatagttgcactatgagatcatttctagcataaatagttcttgtatagctacatttgcaaataaatttgaacacttacaatgtgactatgtagacatacataagagtttaggtataacaagtagttaacctcaacaggaatttcaatagatttttatctcaattgaagctgaactgttaaaaaaatggtatgaagaaagcgctttgacaaagtatgcaagcatactttagcaagcagagggagaatttaaaacgactaggattagtttatatgagcaacgagagttgcaacaaaatgctcaggacagttgtaatattgacaggaaccaggctcaaggctgcaacaatctgggggaccactaaccttcttaaaaaatgaagggatttatggcaatgcaaaatgggggcaccagttgatcactgataccatcccaaagaattggaagcttgaactggttcggaaatccttccgttgaaaggattgttgggagttgtatctagacccagcgacgagtcgccgaggactccaccgccgttgattctgttgaatatggcagagaatccggacgatctctccaaggcagtaccgtcagataacccaatgttggactcaccgtcagaaggaggcaactcaattgctttgcccttcttgaatcttttgaacaacaacaccatgaacgacatatacaatccacaaccagcagcagcaccgatcgtgatgccaacaattcttcccttatcttggacttcaggaatttctgtactggaatcgatggaaccgtagttctgcgtacttccggtagtagcagcctggccatctgatccggagtcagaagtatcaaggcccgtcaacggaattctggcatcaatcaatgaggataaactcctttcggtggcatccgggtttctgtacaactttgagtctggcgtcagaatgaagttggccaaggcagccacagagtcactggggaaatacacttctgcgactgtaatggtgtaggttattccctcggcagtgaagggaatcaatcttctcacagaaacatccttgtagttttgttgatccgaaaatgggaatgtcaaaacttctggtaaatattggaagatctgagccgatgatatggagtgttgtacgacgaatggatagttcaactctgagttgaaacctacatagacgatctcgtaattgccgctaggcacagtcgtaacagctggtgtgatagctctgggcaatccagaagcagatcccgggctatttgtggctttggcaatcgtgacatcagaagctgatgggttgttggcagaggtattttccacaatgatctgtgtgggcaaccatgatcttgtatcctgagaagtagctccgtcagctgcaccagtagtcagtccagtagcaacttctggaggagttgtgattcttgtgtctgctacagtaggagacgtcaagactgtgcctgcgggacctgttgtggcttcaatctcagcagaagaaccagattccaatacaactggagatgtcctttctccagaagctgtagatggtaccaccgtggaaccgttggagtcggtagtgacttcaactgcactaccattagcagtgccagttttagactcggtagctggagtcaaagtagagccgttggagtctgtcgtggcactagtagcaggcgatttagcagcttcagaaccagtaccctcagcttcagaagaaacaccagtagtgtccgtaattccagtggctggttcagtcacagaaggagtcacagaaccggaagcttctttagtagtagcagtagttcctgcaccggtggcttcagaatcagtacctgtagtagcaccggtggcctcagaatcagtacctgtagtagcagcaccggtggcctcagagtcagtacctgtagtagtagcaccggtagcctcagaatcagtacctgtggtagcagcttcagaagtggctccagtggccccagaaggagtaccattggtgattgcagtcgaggcttcttcagtagcgggagtctcactagcagtgtcagaattcaaggctgtggtagctggggttccggtaggactggtagttccagaagattctggagcagtagcaggtgaagttgctggggtttcagcagaggtaggagattcagtgtttactccggtctcagagccaatcgaagtatccgtaccaataactggcgtggtggcttcggaagtagcttcggagactgtaggtgtgtctggtgcagtagcagcagaatcggtaacaacagcagaatcagtaggagaaacaggtgaatcagtaccagaagtcacggaactactcaagtttgtttctactggctctgtggtgtctgtgccactttgagtttgagtgggaggggaagcaggagaaacactacttggtgaggcggtgttggaggtatctacaggggcgctcgagctctcggtaccgatatcggtgtcagaagcagtctctagatcagtagacgaagtgtcagcggatgagctaccgatcgtgtcagtaggagaagtgttagtaggtggaacagcactaggctcctctgatcctggattggtagtgtcagtagcggtgaaggtaggagtagtgttttcactaacagtaggagaaactgtagggattacatctccaacattactatcggtgctactagcagaagtattagtgtcttcactattggtatccgttggcgaagttgtgtcaatgctagaacctgtagtatccaacgaagtgtctgtaggtgaaaccaaagaaatagaggaatcagtactggaagatggaggattgccaacttcaggagtatcagaagtaggagtatcactggaatctggcagagatgtgccagcaggagaactagactctgaggaaagctcagtcgttcctggttctataatagaggttcctgtatcctgagaagacacaagaggcggtgcacttgaaaggtctgccgctggtgtgtcagcaggagcactggtagcagcagaagaagttggagaatcagttggcgaactaactggagattcagctggcgaagtagccgaagaacttgaatctagatctttcgaaagagcggtggtgtctgcttccacggtggaagtgttatcagaaggggcagagtctgtaggatcagaaggagccgtcgaagaagtagccggagagtctggagacggagttaccactgtatccttctcagcaggagacgaggacgaaggagcatcaggagaagaagctgcagcatcagaagaaggaactacggcatcagaagaaggagctgcagaatcagaagtagaagcagttggagaagtggtagcagagtcgggagtagcaggagactcagaactgacagatggtgggaaagcttgctcgggtggtgaaactgctggcgtcgaagcaggggatgatgaagacgtattctgattgctattaggaaccggttgattcaatgaagcagaagtcgaaacagaatgagatgaagacgtatcctgactgttgggaactggttgattcaatgaaggagaagtcgattcagtaccaggatcagctgcactgctgggagtatttcctacagtagttggcgggtctggagaagaagtaggagtgatcagagacgtggcatctgcgggtgaactagcaggagaatcaacaggagatacagatgtagaagacgtttctgcgttagaactagttacactggttggggtattgctagttggcttgtctacttgaggggagttcgaggtagcagtggtatcagtagaatcactgttttgttccccgatgttgttttgaggtctttgcgttgtgtcgctcttttggtcagcaccctctgaagatgtgcttgtggtggtgtcaacagaagttgtacggtcatgctgtgtctcagtcgtggagtccttcacttctacgggactttcagtttgagttcgtgtagattggtttccattgttgttgccgtcattctcgtcatctttttcgtcatcttcttcgttgttacgagtagaagtaggtgctgcatctgacgatgtttcgtcatttctttgattgtcctgactaccgaagttgaaacgagatgtagtttgaggatcggaactcttagtagtatcctggctatcgaagaatgggaatggaaagccatcatgagcagtggtctccggtatatcactagttgctacgtcactagtttctggatcgaaatcagggaaccatggccagaaggggtggtctacagttctgctcggtgtgaccttaggactagaagacgagtctgctccaacagtcttgacgtaagacaacacatagagcgaagcgacaagggtgagtttgacgttgtgaagcatggtgaactaaaggggtataaaggaaccagatgaaagaacgactggggttaggctgttttagagaaaatggacgaaaagctagcgaggagaacttgtagatttattcagtgaaaaatctcttgtctttaggtttttattgatctacggccatacagcgagtgaatcttagttatggacaaatcgggaaatgaacgaatgtataccgatgaatgtacttggtgacactgaaagtgttcctatcaatcgcaaattaggaaattggtagtcgacactggtgtcttgcagtttacagtggattttacttgggttttatctattgaattgtgttcaaaattcgatacttttttggtgctattgatgttcgtggtgatgccaaaatagacggccaggcaaaggaaaatatgggttggtacagtcgatgactgaaggttgctgccggctagaagatggatggatgaatggttaaaggtggaagaaaacaagatcgaaaacgaaatcgcaaaccaaatcgaaaaacaaaaatccgcaatcttcaattttacttaaaggatgaaatggaggtatttttattgttacaggaattctcactgttttcttttgtctggtgtggattttcaatttttcttttgtcttgtttttttgatttaaattttaattctgcatctaaggatattttctaacgcctgcaggagatgcggcaggaaatcgtcgcgtactaatggttgcgctgcaggaatacacctctgaaacatccttgccccaacaacatgcccaatgaagaaaatttcgtttagtgaattagacggagcaagttggaatgtgaaggactccatacgatgcgaagccttcatttgccgcttcatgcaggttatccacgatttcatcactatattgatacgaaatatggtaaacatgcttctccaactgaagtctacctctacagcccaaattagaagttactctgtctatccagaccgtgtatctagacctcacctcgtcttccgcagacctagatagctcctaccctgagtcgtctaattgcatttgctaatactgttttagtactgtacttgtctttcacaattttctatggaggtccacaggcacgctcttgcaaaatgacgactcattgttaccactgtctcgcaattaactacaatacaggtaccctggctcaatctccaaccattgtcgcaaaactaagtcgaggacaatgcggaagggtttattattcttctacaatgcgctagttatctatggtgttctggccgttaaccatgcccgaggagacgtcgcctgattttgcgacctactttcttattacctggaaagtgcattaatgttacgcatttcattatattataatgtatttagcagaagaaagtcaggcaccgcatcatccagccttcagaagtggtcgcaactcagggtctggcagttacctttacttatcaaagacatcttcgtttcttcgaaatctccttaagtagtagtcattctggtaaacctactgcaaacggaaaataaattttagaacatttagcgctagatgtacatgaaatcttttgacgtatccaatgcgactctatctcgtctctgtaatacaatcacaagcacgaagtgaccatagcttaatatatagccattgagcgttgtcaattgaaaattgtacaaccgtgtcctcctcgtagctatccttatccttccgtgctcgtctcatcattgttgctgttcaagccggaaatctgctggagtttttttaggtgcgccaacctcacattgtaattggagagatgttgtttctaaagcgatgtgccgaatcgcctcgaattctacatttcctttcttcgtactattatcggccttaagaagactattaatgcgaccattggtcgcctcggtgtatattccgcatttaacctcctggttgctttaagtccgccctctacgtctagacaattagtttccaatgaaggtaacttcttttgatcctcattaggttcgtatccatattgggatcaaatgagtatcttcgaattggacccttgatagaattcactgaatggaaatgtcagcttcagactcaggtgagcactcgctctcctcgaaattcattgtaagaattagctttacgattagacaatgccatgaatatatctagacatgtttgagcacgtgagaaattcaataagcgacaattccacttattgtaattccccctcaaaggatacacgatttggtgaaagcattcttgggaatgtttacatcgtgaactgtacggtgtcattcttaaagatcgtatgctgccaacattcttgaagatacgtcggctcgtgattgtgagagtggtatgtaatcgcgaaatcttacgcaagcgcgaaaacctcaaggctagacaaatatcaagaatgaactattttcaaaattaaaattcgtagttctttgttttctctatgaagaattcaaacagaggttatgacgtccagattgcgtcgcctagacaagtctatcctaagagcaggtgatgattatggtgaggatgagcccacttcgcatgtgttgttggatatagacgaacaagaggatctcatccagagtctccagctggaaaatcaggaaacgtacactacatacaagaaatatttactatttatgattcgtatacaattaccgtgtattattctcctagagttgatgcatcgtcaacgagacttacaggctctcttgatattgttgtctcttctgatgacacttataaacatacaattcgaaactgcaaagtttgatccggctgtggttgtttcacataggccaactgcttcggcaattggatatttagtagatcataatagtgtcattaacggaatgatatgtatacagttggtgtatctgtttattgttgctggtgagttgactaaaatgtactacttgttgccgctaataaatttcggctcgcttcaactattcagggtgtggttctcatctaccagtaaagatgttgaactcttgaacagcctcaaatacaagtacaagaacgtgtaggtagagggattcttagacacgtgttcatccaattgcttgtgtgtatcgtaatgatttaatgacatatagataatagtattattgttagctttctttgtggcgtagatgtttgagttcagtcgtcaatacctttcaaaaatagtacctccaaatgttaccaaacaatagcgaatgtaatattgcaaactggctacttcaatacatcaaagggggatatatttcacttccactaatacaaaccattattaatacgattttcgaaacctctattaatgtagtgaggtatgtagctctctgatgtgcagctttcaggattgcaaccaaaaagatcgcattatgatcagggggattattatggaggttattgttgagtaatccaattgagcgggtgaacatcaaccagaaataattgtctctgtattatttgtaactaccctgctacagtttcgttgatactgtattggctcaaaaaggaaaacatttgtgactctacgcaattgaatgaacagttatttttatcgtatctaagattttattatatttgcaactaattctgaaaaattgtgataatccttttcatatttttaattgatccaagaggtatccacaatcacaactgtgatccataaaagtgtcaaattccttgatgtactgaattatattagaattcagaggaattaccttcaggggaaactaaaggtttggattaaggtttaaggataataacccacacccgtgttacacttttttaagtggaagcttaccccctattggtttagcgtctaaatcaatacttggggtaaataatactgaacaaccatttatattgaaatttgaaactttgacggggtacataatagtaaaaatcgatttcttctggtgcacaaaactctttaatttgcagtttcgatataatatgtgttagtctacagctgccttggagatcaagtacggtattataatccgaacaattaaattttatgttaggaagggtgtctgagacagaagggagtaatctcctatagtccaacaaaaagttgtcattgtgacgcttcgttatgagagacatcaagagattttcgtcggctggtaaataggtctagttcaaccatgttatcacgaataatgtattcctactttctacttcctacttagtacgaccctattagtggttgggtatctatcaagtgtggctccatgggccgaattagtactctttttgcggttttcatcttgtcaaactaatcgagatgaaaaagatcaagacagatgttgcttggctgtccgtcaggtgacaagtcggcacaataaaagtttttcaaccttaattgcacaatagtgcacaagtgcaagtttaatacaagccaattaaggcaggtgcggcagatttctaaggcagcaccacatcaatctgttgatgtaaggtaagtcgagcaacaggacaggcgggttttaagagacggcatttttgcctcgagaaagcacaatgtcgtgaagtcaacgttataccgatcaagtcgttgtggccggtttggaaactgaaacaacttctcggacaacgaaaattaccgaaacgagacgtggaagattttacgacggagacggaaacaactctgtgactgcgcaagcggagagccgatcgccaaattgtactatgtccatccaagttggaagggtttcaaagtggagtgatggacgcagtgaaaatttttgacaccagcacaagaggggaaaaccgcatattgtggagagttttctcctccagctccacatttagaagttggttagcgatgggtacaaaaaaatactgaaggttaagttccaccgcgcctaattatttcgttttgtacattttactgagagcggcctggaggaaatttaggcgcgaattacaggaaaaagcttcgatgtggagattactaatttactgagaaattgatcaaaaagaaaggtgggggaacactcggaagagagatcaaattgccagagaagaagtggcagtaggagactactgagaactcagagtcgtagccgactaggacatttttatactattcctggcacggttacgagggttccataacgatcataggatcataactgaacctatttgagagaaagtagtttgtgcaggagtcctaattgcaaagttttctccgacacggtgatagatctttattgatattttgtcccaaaaatcaggaatggagaggtgcgaatttttcagggttctatcggtatatgcaggatttctgtaagtgaagtggttaaaaagcttgtgggacacaaggggaaagtgagagttctagactggaagcaggacagaggaggcattttggtgcgctccatgtgccctatagtacaccgtggtagctgcgaagagcctgtcgattttcaactgacaataagctgtcccgtcaatacgttccagcatttacaaggagtttcagaaaaccaatggagaattagctgggattgtcgtaaagccagctgtacaaagatttgcgcggaaaaaacggaactacgacgctatgtagatgtatagacagcaaaacgctcagaaccagatcgttttatgcgagtatggcgctagaaccacctgcaatgagccaggccagatcgtactagtttcagatcagtactattccgattttctacagaatacacagaggtgcccctaggcaataaggttgtcaggggtgaaaaaaatatagccagtcgtaggtcagaatctggtggtggtgatgtacgactctcgcttagcgttgtagcagccatttcccgaactggagaattaaagtacgtagaacgaaagcagtctatttggggccacgaaaagagaggtgtccttttctacaagcagagagagaatccatgatctggccagacggtcggcatcagaatgtactactttatgctaaccagagatgatggttacaaccaagccatgttactagacggattatatggtatgatctttatatagaaatattctaagcgcatcatcacctgataaaaatttgcaagcgtttgtggtacaagaagcggttggttcagcggttactgggaaaaccagcagaactgagcgggaagcgggaaatggcatgagcccggcagcaacgatcgaaccatacaattcaagatcttctagctttaggggtgttgtacaaatgttgtctggaacactcaattcatcagcagtacgttttctgatagattgttctacaacgttccatacatatagagacaaacgtgtggcgacgcaaaaccacggagtaaaaggtttcaggaattgcggcagtgtaggagcgagttagggaggattagcgatgagcaataacggcaaaaaaaaatttgcaagcgaaatgatgacacagagattgcgacatttgactcatagaataaaaaatagggaggatgcgtcatagaaagaaaagagctagcggcaattttcagtgcgagagagatagcgcggttaatggccaagatgctagcagaggtgagccacgttcaagaacgaataagagaccagacagcagatccgaatatgtagcttattgttcgcagtttcttgtttgttgttggcagcgtgtttacggttcatagctaatagaggatgccacgagcttagattggaaacatgtggctagtggaaagtgctggaacagtccaggacgactgtaggacggaaacgtgtggtggtagtggaaggatcggtaatcgtggtggaggtgcaaatgcgttagtgcgaatgtgtagcgagagactagacccgcccatggctgagaataggggagcgtagtgagaaccgtggtggctcggtagaacgaccacgactctcgccagaaaaaatgctgctgtgtaccgctagcaccactgcacgtgctgtctgaaaaacatgactccacttgtgtccgcatccggaaatgcgttagtgacaagagccccgaaaaccaacaaaataaaaaggtaatcatgtaccatgcaaatttttaccttgtgcgcccctgcactaaccggactcttcctgctatgacgaatgccgtcccacacctgtgcgttatgaatcaatgcaaactttttgcagttacacagttttttcacctaacctctataaataagtgtttggttgctgttttcctattttcggtttttgcaaattgtttctttattcatttttaccaaaccatcttttgtctcaaagacgtctcatagcatcagcagtcactagcacagctgccccactagcatcggattcattccacacgaacagaagaagttttcactctctttgccaacgcctcaatataaatacttaagcatgtctgacttggccttcaataactactgcttgacttgcgacaagctctgttcacaaaactcgatctactgttcagacgaatgtagagccgtagacgaattcaactcgtccaacataatagcacagaacacccagcacgaactcgaaagaacttctgtttcatccaatgaggaattagtttctcctctcttgactccttcgttgtaccagcactacaaccagcagcagaatatagatgtcaacagttcgcctttgcttttgtcgacgaaccactccacacaggcttccagagacttggactactttgacttgaattactccgtcaagtccaagaccaactacgccttgtctactgctaccacagcatccacttcaggcaccgacttgatctctgccgctgttgcgatcccctcaacttcccacaactatagaaaatggcttactgcgtgtctttagcaaccaaagcagctcacgaagcagcaaccaaacaacagtagctagctacagggaataaaggaaaaaaagggaaacataggggcaatgtgacaggaaccattgccaacggtattaaaagtcaaaaaaaaggttcatatcattatttatcatcagcatacaatctgattacatcattatttatctcgtacaatttatgtatttggtttaatagagcaccaagtcgaatcatatcaaaagtatttatagtggtatatagcagattaatacaggttaccagaagatattgacgtagtgttagtcttgtctagtagtcagtagctgtttccctacattagatagtctttagttagttgtcttaatgtcagtacagacagaatacatattgaattgttaaattttgcttaattgaattgcttaaaattgctattgtagagaaattgatattgtagagaaattgcttgtagaagttgcacattcttagcttggaattgactccagactacggccgctacgtttactatttcgtttacgttggctatccagtttcaccacgtagattcagatgataaatttttcacagctagcccacgcacctgacacaaatgtctggttagtaaaggttggaatcgtggggtaacgcggaccgcgcccaccggtggtacagtagcgagagcagctggctaccgctaaataccgttatttgctgcggtatttaccacggtatttaccaccgtattcagtagctccaactccctaactccacaattcaccacggactttcacaaggacagcgctatcattctatccgggctctcctcttcctccttgctgacccctataaccagtccggttctagaagtggtacttccccttttctcaacaatgcgtatcctgtgggcccaccgttttccagtcagtagacagatcgtttctgtcacaaattccataccccaaggagccagctctcttccgtccgtccacttcatgaatgatctcgttcttcccccacaatggacccctcttggtctcaacctttttttgggtggtgtgcatacgggaacagctggcgattgcaaaatactgaaaccagtctagagcagctactgggaataggagagcaccacagcctagccatagccagaactgtgttagggacgtagttctagacggagttagtccttggaaataacgtcggtatcccaaatagtgaggtgctgaagaatacggactccggtacatctgtgtgtccgagcggaattgaggcaagcacagaatgagcctttgggagcttctgacaattttccatttctttctcttctttccatgcttaaacagagctcaaaagtatacgggtcaagtctagaattagagcctacatctctccaaccatctgctaatatccagcatccacttaccacaggtgcctgtctgtcttgtcatgagtcactttataaccctaatactcatccggaaattacttgctagaagtttcttctaacgtgacactgaaagaaaaaaaaatagttacatcaccaacatagcgaaatgtctcgagattccgaattcggcagtgtcattaaaacaaccaataccagactaagtccgtgctcctaaatataggtcaaaatgttctacagaattccaaagctttctccactgcgccgaatcgccttgtcccacgtctactctggcaacgacaatgaaacgggatggaaatcaggatttcttgtcccaacaccatcggaatttggtggaagctcgcctcgcggcactattgttgtagccaacatcgcgagctgctctacgcctacaatctcaccgttgctgtagcctatgccagatgcttacaataaccgttgcactacatgagttgaaaaaattgttatttttaaatgtgaatttttcacggttttcaaatttttcactctgcatgatgcgtctaggacaacagcaagcgaactgcgacaaccgtgctaaatctgtaggagaagcccagaatccggcggtaccaatcacagactcgtctggcatgtcctggtatgtcaccatcgaaccaagaactctttcgggcattcggatcgagaatgagaatgagaatgtagctcatgttacctgagtgtgcacttgtatagagttcacaaaatagcgtgtctaaaagctgtagagaacgatttaaactttggtgggtttacctgttagagcatagatttacctcccgactacaacgctatttgcgaaatcgagcaacgaaatgcaaggtgtactcgtcaatcacacgtacgattaacaataagacgagcctttgtactgcgccgtacggtaaagagagggtttgtaatataatcaactgcttttgcaaaccagttatggggccacgtttcctagagtttctgcagagacatctaattgctccaggtatgccaatttctacggtgatcgtagtagatcgaatttgctcatctcatctcatctcatcgcaaagcgcaatatggctcacacgaggattcagagtgtgcctattatatttacatacacagaaaagctgtagaaacagcattatgttgatggcgtatacggcagccacagtagaccattgcaaccatggccattgatttaaaatgtaaaaaaagtatattatataaccgttaatgggagttttgtatttttcaaagctgttcgttgccatacgtcatggtcgcaaaaatgtcgtcagattctatcgatctctcgctaggcagatcttcgctcacactctttattgtctctaattagctttcactatatctggtcgctagaaacgatcctactttacttttgctggaacagttcaaaaggaaagacagtattgggacctagaaggataaccagttcggtattcctcttttgaattttgtaatctttgtcatttttgtctgtgccagagccaaataccagtgcattaattaaatgggctaccgaatttgtcgcagtgctcattttctgactattctcgctattctcattttctcgctattttctcttgctccttttcctcgctccagtttcctcactctcagcagcaggctctctctattttcgcaacaccctcaatgttctcctctgcacgaccaagtatgaatttttcaaatcttcaccaacattagttacgaaagctagtacagtttgattgtaacaccgctccgtacaaaacacacattacaacatgtttggtgctttcaaatcctcacccgtagtgagtggaggttacttgtggaaagttgctcccagattgtcgggcccacaaaagtacagattgagaaacagaatgaagcaagtggaccagaatatcgaaaacatctacacagctttggttgcccacgaaggaaagaaacagggagaatccactggctacgccaagatcgatcacctcaagttctcgatgcccaaggagtcagaaatggcaccccgtgacaagtacaccactttcacgaagcactccaagacttaccgtaaggaccttcatttggttccaaagtggaccaagaagtccttcagagaaaacccaaagtactactgatcgcattcagttactttatttctcctcatgtttaatagtagacttaagaagctggaagtctaagactcccgtttcgaaacaatttcatatactgagtatatgaagttcatattgcattcctttgtacatagttgaatcaacgttcatcatatagactggccaccagaatggctcatcgtaatgtattgtagtactcctgctggttcagaacttccagtccagacttttctaaagaatttgtactcatccatactacgtagtcttgccatttcaccattagttcgtaatattacactagaatacagctatatgttacacagaatcgtctcgtctaagatgaggatctacaaccgatcccagagataattggagataaagtagtcgctatacttgggttctactttaaacactgatgacacgttagagtccttattatggatgagtatatggtcattggtagtaacagtgtcattctcaccattttcgtcgtcaaaattatcgatattcactcccaagttacggtagaggttgatcttcaagatgttagcatcttggttgacgagatcgtcgtcattggcttcgctgtcgtcaaatggattattaaaaagattgttgattttagttttgagttcatcaacatttttctgcaaatttgtcttgttcaatctgagaaagttgatggaactttccaagtcattgagattcttagcaattaccactttatagttgtctaactcgacggatttcttatttagcaccttgaatatgttttcgtctctgttgatttgggtattgctgtatccggctatctcagttatgtttcggataacctcgtagttgtagtcgctgattttgttcaaaagactgatctcgttattgagttggttaatcgtgacttcaagtccctttttgctcttttctagctggtctatcttttcatcgcgagcgttcttgattagtctgatagtatcatctattctttctaaagtgagtagctccgggtcgatttcgatgctgtcgatcgtttgttgtaaaatgctctccggaggtccttctatcatggcgatctttctccgttgctgtatgtcaattttgaagagagcaaaagagcacagatttagaattcaattgatttgttttgcttatagtactttttggatatgcgctgcatatagcggatcctttcaaaatatagaccatttctccatagttaagcttcacagacagcaattcatccttgccgcagtaatcaacagcctgagctcaccacacagtgctgaaaatcagttcatgaaaatctccagttcccattagttattctacgaggagcctttccttccagatacccattctacaccatgagtgaatacggtaacaagaacaaaaagacatttgaagatgtcgaattacccacaaatcccaaccttccggcctgggtcattacacccaaggaagagaaggtgatctttgacagatggaggaagaaggcattcgccaaatgtgacgatctcatcaaagcatacgttgagtgttccaacagctacaagaatccttttgagggtatcaaaaattgcgagaaattcaacgacgcccaattagcctgtgttgctcaataccagaagaaagagtacttagatattgagagagatatcatgatagatgaaaagatagcgaagaagaaattgtacaaacagcacttaaaggagttagaggcccagaaggcgcaaaattagtaaatcagcatacgtctatatgaaatttgtaaatagtctagaattcatgttattataacttagttatcagtaaatctgtcttctgagcttcctagaccaaggaacttggttttgctcgctgtagctggtatataagaagctactctaagtgtgtagtggctcggatagccgatctacattcattccactgtatgactctgtttgcaacggtgtcggtagctagatcgatgttttcttttcccttttcctttttctgtcacaaggaacgagaaacatgatgaaatcttcaacacgggacactgtgcaagcgtagatatctctaaatctcttttccgaagagtctatattctggttcgcttcgtgtcacattctatatccgtctctagtcgtcacggaaattatcgctctcaaacacagaatggctggccatgaacaaaccagcatgcaacttgcccaatttttctattgattggtactggctacaagttgtctggatcaagtcgttgaagtctgaaaggttggcatgcaactgggccatttgggagttgagatggctcaactgacgttgtctgatagaagacgttacgttggagtggcttccaggagagttgatattgagtggcggcgagttcattatggtactatggacgaaatcggctcgaagaaatatgaggttttacgatcgatgaattggaatattaaagtattatgtgaatgggggtagctctgaaaagagtatggaatactgatctttgaacaaaagaatgagtatgttgttatgattatacgcaataaacgagaccggctcaacaggcaacacgacagcactatatgatacaatagatcaactttactttgggattcgaatgtcgtttttcaaggtcttactagagaattagagatgaaggagttgtttggtttttttgtatgtaaacaaaaccggtattgtgcagtgcgatatcaaaagtaaagagaaagagccagatggttgcgaacttcacaggattcactggatcacgagaaaggcttcagcacggttataaaacgttaagtatattatatattgcactcgtcccgctgcttgtagttggtagcattctttaggcttgtagtttttagtgctcttgtcaccgaccaaaagatctcccgtattgccagagtagaacagatgagcatgaaagggaatcaccgaggattacgaactcgatgactgaggcaatgaagttgcaactcaatccctaaatggaacccccattgtatcttccttgtagaaattgaatagtcatcctaatcggagttcaccgttgctctaagccagctagaaatgctcaagacttgctagcattaccaaacttttcttttgtcaaattactttcttcactttcttcgttccgaattctctgccagagtcatcttctagtattttcgtctctactggatttcacactcgaattgctgactgaaatatctcaactgaaaaagcaacacaacttccgatacaaccttgaattactactgcgatattaattgaactccgtcgacccgactttgtcctaccagccgagtggaaccgcgctgtgtgcacgccatgactctgggtctacggccggaccaaatgaacgatcacagctagagaagcatcccagagaagatataaagaaggcccaaagaagtccagatcacagtgggtggaaagtgccagcaggttgcttcagcaaaaaaaaatacaaaatttcctatactttgtagacatcggacttccccagattcggctccacaactaaaaattaatctcaggcagagacacccaggtgatttcacagaaattacaagagccagctctattcgctctagaagaagacaaaacaacaagcggagcctgattagctctaccgaatcttatatttagcacgtaagctgttctctatctcatcgcgtccgaagactcattacatcattccattgtgattctggtttccgcacctgtctaccaaactaataatatccctgaaaaatctggccatctctggccataaatgcacagacacacaatccggctactcttatctgatttatacaaacagcatctttaatctcgtatcctcatctgataagcaacagcgactgccacagaagaattagagtatcaatatacaagtactattgctgttttcatataaggcagttctcatattggcaaactcaagagtcgcaatctcaatctcaatctacctgagtcgtatttttcagccagttattttcataaattaaccaatttattgacattcaattttttttcaacccacaaaacaccactaccatttctccaaactcacagccttcttcaagttgccgtaccagaaaccatgctgagccctgaggctgccagagtgtcgcctacactcaattttccggccgccaaagtcaagatggagacttcagaaagctttgattcgcaaaagacaaactcgtctgcttccacagtctctaactccaccttccgcaacccgctcataaagaaggagaacctcacagctacgaaactcacaacaatatttgccaattctgcagctactccacctcccgtggcaaaaggttcgcagactaattcctctcccagctcttcaccaaattcaaacacaaatacgactaataccaacacgaatacgaacgcaatacccatacaaaacaattacaggggccgcatcattggcaaagaaccagctggaccacagttaccgccaaagcaccatcccaagatccagccgtctacccacaagtatcccaagatccagccccagatcgcacccaagcctatagcagtacttcccaagccttccagcttctcaccagttccaaatcctaatgtcaagacatcgctcatgatgctggcgccaacatcgctggataaaacttcgttgaatatcaacacctctaaaagatgggtgcttcctccacgacccagacctggcagaaaacccacagcttctgctgaaactgacgataaatctaaggccatagccgtagcaaaagtcagccccaagaaacggcccaagatcaagaaggaaaccgtcgaaaaacaggtagttgggacagtcaatggagtaccagtctcgaaatccgtagtttctggtacaattcctagcaactcttctataactcacactggaccttctacactttcttctgcatctgtcaactcggcaacagtaaaatcgcaagatccacgccatgatttcatcgatgctaaatcaggcttgtcttcggacgtagacaaaaggcagattctcgcccaactccaacaacaatactcccaagcaagcaacggtagagcttcttcgcctttgtctacaacttcagtatctattccaccttctgtttctaatagtcctagtaacaagcactcgccttcaatcagctcgccatcgtccgtgcctacttcttcttctgcttcacctctttcttctcagctccctcttcctcctattgtctccaaaaacgatcccaagtcagagatcgctaacttgaaaatgtcttatctttcgaagttgaaggaacaggaactaatcagaaactacattgaagttataaccaaccaaatcaaggaactcagctttgtgcaaaatggtatgatcacttttgatgcattgagaacaaatctgacttctacaggcaagtctaaaagagtcaacagtccgctgacgatatccaaaagtacatcctatgaccaattagaatccattagcaacttaaacgatctaaacaagttccttaattacctaacgaagtcgtcctctatcatacatagcgctaccaagcgtagttcagccagtaatcaatcttccaattctgacacagtgattaacagtcagatagatcactatcttgagattcggtccaagttcaagtcgatgaagacggaagagttgaagcgtttaaacaacttgagaaagcaaaagaactccatgaatggtgttcttccaacttcagtagtagctggaacttcattgtcaagtaatggagacttagcaacagcagggagatcttcttcattcacaccagatcttcttaagccgttaaaagcttctactctctttgatccagatggggaccaagatatcgtaattgacattcttggtgaagacaacacaattggtggtaacttggtttctgccgataacaacgctctcaccagtgaggatatcgacatctttatggaagagaacgatttcctcaaccgacttatacttaacgacgatgtagacaacgtaggaattcctcctaacgctgacttgttgaaggagcaagagagcagtctccgggtcaagatccacgacaagaacgagccggttgtccaggattcgttgttgaagaagaagctgaagttgaactgtggcttctgtacgaacgatactccctgcctttgttttgatgctgactttgacatcggcattttgaggcattagtgtaatgaataacggtgtatataatatttattggatgggacattgtgatctatgagtaaaggcaatagctgtagatatgagcgagcgatttgtaagagatttcacttaagcaactatatgaaatcacatctttttgttactataaactataaaccataaactatcatcctatcgttaatgtgatattctagtacctcatgtaggcgatttatttcttagaggacgaaatcagaaccgtcactatattgtgacagatctaaatgtttctatagaaaagtgtttcattgtgcttttgcattaaccatgctagtatataaataaataagagaatatgtatgattcagagtaatgcgggagtctggtttaaggaagactcattatgataagatgaacgaatctgaactgaatgaatgaactgatataaagatgaagctaaatgaaacatcacactgctgtatcacttcttgaagatatagaatatcatctatcatttgcatctttgcaatttattcacaacttacaatcttctatcatcttgtccagactagaacaagcctaaaagaaagccaagtaggagccgaagacggcagtaacagctaatacagcgtaaccagttctgtagacaccgggaatggacaattccttaccgaaatcccagaccaagtgtctgataccgttaccgaaatgaaaagcgaatgggtaagccataagagccttggctgataacttgacagcgacaggcaaagaagcgaaaacgccaaccaaaacagaagcatcgaaaggaatgttcaagatagaagtggcagcgtatccacaggtcaaggcgtagaaggcgccagccatggccaccccggtgattctgtgaaaactggacaacaccattgtcaattgtggttggtaaatggtcaagtgaggcgacacgggtctgtttttacgttgggctatcaagatttcattctcttgatcgtgcgaagccttcacggtagagacagatctggccaacaagactctggcagcagagagtctggaggctgacatggcaggctttctcaacaagcccaagctggaacgagcaagcatattgtgtgaagtagcgaggttatacaaaagttggggaagagtagagatgaaaattctatgtatatatggatattcagttttgtataaagtaaatcgcagataccccggagcaggattttctggccaatgagagaaatttaattacgcaggagagtgtgcgtggtcatgtgaccctctagggagagtagagaaagaaaggagagctggatatatggagacatcgagtcaatttggtacgtggtatttgtgatttgtggagtgccaggctgtataaggagccgtgtagtatgatattcatgagctttctttttaattgaatcttgattagcttctttgctcccacttttttgcctgtttttccactctgtgtatttttcagtgtatttctcggtatttctcggtatttctcggtgtagtagcatatatttagtgagctgaattagcgtgcgtaagccgtagctaccacaatggggcaaaggcatttatcgttatcgctagcattttcattttgcaactgctcacacgacaatcaccaccggtaccgaaaagtgcaacatcagctaattcatatgctcttggaacttgtaattgttaaatcccacggtccacagtccacggctcatgggcatcccctatcctagagctggacgtacgtgttgtgccaatgggcatccctgtacgtcttttcccactgggagtctccgttcgcatcgtcatcagaaccgcgacagagtcgctatatgtctcactattctctcgctacagatctcgcggacttcgctatcttccattgtccaattttttctccctacatttctgactccagcccggatgcctgaaaaatgcgctggagagtcgtctatttacggcgaactctgcaggccaccagactcttcctaacgataacattcttatatgctcagttgcaggcgtttttctttaacatacgatacttttgtttctgtattctttcagttagttatcagatatatttgaggctagcagcagcagtcacacagagtcgtccctctgtttcagaaactttgtggcttgagagattagctcatcgtctactgactcacccgaacatctataagttcaatcgctagaatacatatactggttgtttcaccaggcatctccatcagttagcaattaaaccataagaaattatacaataaagtttctacaattcaaaccatcaacatatccaacatctaagtccttcaacattcaatatttacttcttcaatataaagtttctgggtaattgcttcatattttacatctatactcattatacaacatctgactcttcctatcatgtccacccctccgagcaaacagccgaagttcactctagcgtctcccgagaaagactctagcgacgacgagccaagagaaaacatagctactgtattagacgaaaccaatacaaatctttccaatctttccaacccaaatgccaatacgaatccggatcctactaataacaatgctatcaacggcatccctaatgttaattctaatacaaatggcaatatcactgctaccaacaactctcctatcaacattatcactgacaacaataacgtaaactcagactcggtagagtctccagctgacgacgaaaacggaaacgaaaacaagctcgacggttctgatttgtcgttcaccaagaaagatccccggaagtcacgtactcagtcatttcagtcagtgctatccacagcttcgttaaagtcattgaaacaacaggccctagcaagtgttcccacaaataacaacgtcaatattggcactcgcagcagtagtatttctcacaacaatctcaataatctccatagcaacagcagtaattctaatcccaatatcaatgctactgctagtcgcaactttcagtcgttcatccaggctccagttttgtctagcatcacgaatctcaagatggaagacgatatcgagatcggccagcagttgccgtttactgagtcaaaagtgacttctcagcgcagtcgtgatcgtgctacgtcctccacaactacagctgcaactacaaatgctgtttctttaacaaatactaatgccacttctactgttcagtcaaaatctgcactggatcatgatgaagaatatgaagacacgattgtgcaacaacagaagctcaccttgaacgctttgaagaagctctcgttgtctcctatgcctataaatacggctgacaatagtcttacaagaagaccactcaacagagccagttctaagcccaagattgacatagctgaatccagcaaggaatcaataaactcttcaacatctgctccaggaagcaagacacgaactcaagagccttaccagccagcagaagtagacttgtcatcttttgctagtcttacaagacaacccaaagtagcgacggagaagttgccttctccaggtgttgcttccgcgtcgacttcggcagtgactgggtttggtgaacgggattcttcaatcttcaaccctaatactagtacgacttcaaatcctgattcgatcccaactggtacacccagcttgtctcaaaagaggtcattgcctagtttaccagaaggagagcagtttgtagaaaatgtagcaactgagtcaaatgctgctgtacgcagcaattctggtgatgtcaatcaaacgtaccagcatcatccacaagctcaccaaggttctcagcaacaataccaacattcaaagcaagacagccaccatatgcagcttggtaataggatcccttctgctgtagtacctccccagaacatgaacactagacgagttcctctgggaggattccaagcgcccaatgtatacaattctcatatggcatcacaaacacaacagaatccacatcttcattaccccaaggctaacaggcagttgcagcagattaagggattccgaagtccaatgtatgttccagccgtgttgcggatgtctactttgagtactgtatcacctactaattcaaatacgtctggatctaatcccaactcgcctaacgagttgtctacttctccaaagaatggtacacactacgaacacgaccatttgaacttgaacgaacctgctgctacacctagatcgtccagtagagcctctgtaaagtcgtttgattctggaatctctgtagaatcgtcgagctccacaactaaccagccaggttcgtcgcctttcctcagcttgttgggcaagaatggaaatcccgagtcatacattttccgcgctccgcctaccagaaagcattgggttaaagatgaggccgtgttaaagtgtggtatgcccttctgttccaaagtgttcaacttctttgaaagaagacaccattgtcggaagtgtggagggatttactgtaaggagcatacgtcgcattatctctatatcaatcacttggcacagtttaccacgggaggcagaggtactttgtctaaggtgtgcgatttgtgtattgaagagtataatgacttcatacagcacgagtttggagtcaacattgcacattcgtcgtcggagaactcgtcttaccattctgctgaacacattgctcgtactgctaatagtaatactattagtaatactgttgctaagggtagtagtgttggtgttggtgttggttcagcagtagacacagttggacccagaaaggatactagatcgtcacagacacccaatccacagtatttgcggaatggtattaacccaggcaagtctcatttgattggagtcaatgccaatgacgaaacgaaccaaagaagcgaacaagctgtaggcagtgtgcctgccaactggagttggagttcgttctgagcttaactacatcatttatttaattcatactgcagaaggatctgccacggagagcttgatatgactccaataatatgcattttgatactgaatagaggcgttgtcattttatacttggttttatgaagtttttctaaagataatgtagagagtagagaacagtatattttatatctattgattgttaggtatttagccacggtacgctaatgtctttttatggtgatcatcaagattgcattgcagattgtagctacgtggaaaagaagctttgtataggcacccaaacttatagaagcttaggaaattggagattgggaagggccatttgaattggaaggttcgaaatgtgaacttcggacttgaatgctgaaattgatagagtaaatatatcagggtcaatcaggacatcaaagacggcactggtattacattcaaaaagataaagaagtgctatatagtgctatatcttcaattgcctactactctgtcggtattattacagtataaatttaaatatggtaagctactttcttccacttggtacttacattatacattgcatagataatatgccataaatgataaattatgcagaaatcacattttgcaatttttaaggaaatcaaacgctttatgataatctcagtatactcagcacactcatcacgattgatatacaaatacttacacactataccctactaattgttatctagcagcagcattttccacttccgtctttccactctacagtctcactgctgctcactatttgctttccagagccttccctgcacactaccaaaccaccgtgttttttcaatgaacgaatttccactcttacaacttctactcttccaatttccatcaattgaccgccttctgcaccatgacaacccagtccaaacagttgaaggtgttcggcatcccggttgaaacgatccgtttacttttacgggttataattttcctcctggtagccggagctgctgtatcgtctcggcttttctcagttataagattcgaatccattattcacgagtttgatccatggttcaacttcagagccaccaaatatttggtgacacattcttactacgagttcttgaactggtttgatgacaggacatggtacccattaggccgtgttactggaggaactttgtatcctggccttatggtgacttctggagtcatttggcacatcttgagagaatggcttgctttaccagttgatatcagaaatgtttgtgttcttttggcacctgccttctctggtttgacggctgtgtttacttactatttgaccaaagagatgaaggactccaatgctggtttactcgctgccatatttatgggtattgctccagggtacatctccagatctgtagcaggctcgtacgataacgaagctattgctattactttgcttatggctactttctacttctggattaaggcaatgaagttgggttctgttttctatggaactttaactgctctcttctacttctacatggtctcagcatggggtggctatgtgttcatcaccaacttgattcccctccatgtctttgtattgctcgtaatgggaagatacacccatcgtttgtatacggcctattccacttggtatgccttgggaacgttggcgtcgatgcaaatcccatttgtaggcttcttacccattcgctcaaacgaccatatggcagctttgggagtctttggattattgcagttggtggcttttggcgattacgtcagatccagaatcaattcaaagcagttcaagactttcttgggagtttcgattgtgctggttaccgtgttgggagttggcgctttgtttgccttaacggctcttggttggatcgctccttggactggtagattctactcattgtgggatacgaactatgccaagattcacattcccattattgcttctgtctctgaacatcagcctacagcatggcctgctttcttctttgatacttccatcttgatctggcttttcccagctggtatctacttgtgtttccaggagttaaaggatgaacatgtgtttgtaatcatctacggtgtcttgtgttcgtattttgccggtgtcatggttagattgatgttgaccttgactccagtaatctgtgtctctgcagctattgccttgtcgaagttgtttgacatctatttagatatcgtagatctctttaagacagacacagaaccagaagatgaaaaggaaagtgaaaaaaagaagaagcaaaaggccttcaaatttcctattcttccactcgtatcgaggatactcgtcatggcatctttcaccttctacctattctactttgtgttgcactgtacttgggtcacttctaatgcctattcctctccttcggttgtgttggcatctagaaatccagatggctcacaaaacatcattgatgactacagagaagcctattactggttgagaatgaacacaccagaagatgcaaaagtcatggcctggtgggattacggctaccagatcggaggtatggctgacagaaccaccttggtggacaacaacacctggaacaacacacatatcgctactgtgggtaaggcaatgtgttcctcagaagatgtagcctacaagatcttgaagcagcacgacgtagactacgtgttggtgatctttggtgggttaattggctactctggagacgacataaataagttcctctggatggttagaattgccgaaggtatatggccagatgaagtgcacgagagggacttcttcacagatagaggtgagtacaaggtcgataaagaggctaccgacaccatgaagaactcgttgatgtacaagatgtcttactacagattcacagacttgtactccggcagagatggagtagacagggtcagaaaccaaaacatccctgctgctaactcaccagaattgaatgtagttgaggaagcatttacgtcgcaaaactggattgtcagaatctacaaggtcaaagatctcgataatgtcggcagagacttacaccaagcctcggcctttgataagcaaaccgacaaacagtccaagagatccagaaccatcaagaggccagccttggaattgagagaataagaagagggtctttgtttataatatatactaaaaatatatacactgatactgcagatctgtcacagatcataattgtacatctagattcagcatatcgccactactttcatcaactagttggtaccatttcagctgtatgggataaccagagttttttagatgtcatcgaactcaagcctggtggagcaagttcatgaatgtatccctatccttatctctcatggctccactcaatccaacattctaagccattctggctcattctcctatttccacaatggtgttacctcggctgctgatatgcttgccccacctgatttgaaaatccatatctcctgcacatgtcattatagatttccccatctttcaaatccatataaacaggaaatttccaaccacatctttttcttgctgttagtgacattctttaaaccgtaccccattatcatcgaatctcaactttcatacagcgttattcgttttacctcaattttttcacgaactatctaaatacaaaattctacaatgacagctttgcttgacctagagagccatttagtgttctacagatcataccatttcaaccagaccaatattgctatccatctctgctgtatcccaatcattttactttcatcaatcacatttttgagcatcagggaaattcctttcttggataacccgtatgtaaacttgggctcaattttggctttcagctttggcacattctacgtgttgctcgactggaaatgtggaattccagcctttgttgttttaacttcttacgcaattggactcaagaattactatttgaatgttggccctacatccctttttacccaggatgaaatcatcagatacgctatctatgcccatattggttcttggttggctcaattctatggccatggagttcacgaaaagagagccccagctttgttggacaatttgatgcaagcattggtattggctcctttctttgtagtctttgagattgcctttggcttgggctacagattggacttgaagaagagaatggacaacagagctggtgtcaacatcagaaacttcaagttgcaagaaaaagaaaagtcaaagtaagcacattacacaaactgtggtgtacttatttactagctggagattgctctatattttatgtagttatatatgaagaacaagggtatgtagtattagcaatttaaggaccttccttagtgccaagatactgctggtatcttgtcttgacttcagtctcgtagataaatgaaccttgaagttggttaccaatagttagccaaccgggacgagtattgtggtctctaccgaagatctcgagctttctggaatgaacgccgaccaaacgttctacaatgtcgtatatctcatctggcttacgcagagtggcacgagtagcactaaccacgatatctgtatctatctttctgtttagccatgctggattgcccttaactcctacaagtaagtgttctttcgagtggttcaaccaatggcctgttcttcctgtaacaatggttcttttcaactggttgagcttcacccagataacctcgtcagaaatggtataaccccattgcaacaaagcccttctccctatctgtatagatctaccagttacccaaagaagaattattccttcgtcttgaagctcgtgcattggtaatgaaagcaactcttcatccttacaagttccatatggaagcgacatgtgaatatcccatgctggatctgagataatggctgcgaatttacccaataccgaaaatggcaaatagcgcacatcacagttgatccattgcggtggaatcacttttcgatgattctcactgaaacattcaccaatagtatactcgtgagccaaacattgtctttgaatttcgttttcgtctgcactactgttattgtcattcccctcgataagagggtttaacgtgaaataatggacatatctacatgtcttcattttgtggcaggtatccaaatacgaacaatcacccagaaacacttccgtgtggctattgatgattggcaagaaatggatcttagacttggagcagctatatatatcctgagatatcatgtttctacattcgtcgatcttatggtgcatatgggccattcccggaatcgagtttttggtgatgctctggtgatctacatttttcttgaaacagacattggcaagtatctggttatggttcacattgttacaaacttgaaagtatttcttctctacagtcttcaatctcgccttctctttgctcaaaactgatctggctgaagttgctcgaattaacttatcgagtgtttcatagtcacactcagctatttcattcgttgaattattcacaccattaatttccaatctgctatgaagtggacttgatagaatagccaataactcttcgttactattcttgaaacttctttgtttcagaacgacttcatatggaatagtccaacctcgtttgccttcaatacgatctttcaacatcaccaaccgtgttctgttgacataaactagcttgacattcctgttgttttcattaatttccctatcaaataccaaacagtttcctgatattgtattgagttgaattaaatattgaagaaaagatccataatctgaagttccatcgcctgaaccagattcttgttttccgtcgtcgcttttctgcttcatctggtagagaaccataatagtacgtagttctcctctaactggctcatcaagaacactatcgaagtctagcataaaggaaatgaacgacgagaaatgtgacaaatcgtgtttcatgattacggtgtcctcagttttatcaaggttcaattcataaaagagaattggatgtatttatagaatttgaatgaagaattatacatcatttctagttgcaaaatgcggaatatgaaacaagtttcggctgcaaaaaatattcctaacccccttaaccacaataaagaattacaccccttaaaactcagagcaataaaacaaactttgtatttatactatctacagaagtagaaatatagatgtatgatgactttagaagagttgccttgtagaagaagctaacttgtagaggtagatgacatatgtaaatcgaacgaattctatactgcaattcttttagaccctattattcttagaatccaaaaggattatcaggtgtagcagcagaaagattggctcttctaccgccagtctgctgtgtctgcaatggagcatttccaaacccaaccccagtaggttgactctgcaaaggttggttgttaaagccttcaaacagtggctgtggctgaacaccaaatgaagtgtttgggtaagtttgctgtggttgagcaaagttgtttactggagctatattggtgttttggaacatattactcaactggttcatgttaggctgctgttggccaaactggttgaaagcagtctgctgtggttgttgagcaaattggttaaatgcaggttgctgtggaaccagggtgaatgtaggttgttgttgtaccagtgggaatgtaggttgttgttgtacaggcaacaggctaaatgttgtggcctgttgtaactgaggtggttgttgctgctgctgctgtccaaatggagaaaacccattttgctggggttgtccaaacgatgtctgagggaaaccacctgtggtttgtcctccaaatgttgcgactggctgttgctgaacaactgggttgtacaagcttcctccagtaggatttccaaacgatgtttgaggcaatccccctgttaactgttgactaaaggtgttcggaggaggttgattagcagcaaatcctcccgttatttgttggccaaatgccgactgtggaacaaaacctccagttctttgtgctggaacaactgatggcccagttctctgaataggaactaaaggctgattgttgaaactagtctgtggtaggccgccagtaatctgtcctggtaatggtccagttgcttgcacaaacacaggttgaccaaagctagtctgcggcatggctacaattggctgtccaaaagtagtgagtggaggaccgttctgtggtcccgtcttctgtggcacaaatgtagcatttccagtttgcaatggaacaataccaaacgtaagttgaggttgtaaaattccagtggcttgaattggaatgaatcccgtgggctgagctgtaattggtacaaacccagtaggttgagctgtcatcaatcctccagtaggaataggcaccaaaccagtcttttgaacgggaataagtggcccagtagcctgcgttgagattggcttttgaacagcaaactgctgccctggttgaatcaacgtaccagtcttgactggtgctaatgcaggtgccgatggtccgtcaacctgttttggtggaacgggccttgaagcattattgctcagatctaatggcttgatattcaccaaatcttgtaatgaaccagtgtattgaggagtctgaggttgagaacttggttttaaaagatcgtctgtagacctggctgcgggcttaacagcccaagcgtcgtcttcaaattgcttcgaaggagttaatccaacaggtgcaacagcttcctttggggccggctctgccaccttgttaggagatggcaaagcactggcattcaccttcgaaacttcagcacttgaactgttgttcttcaaggctccattagggtcaataaaaagtccacctgtaggagctgtttcttcagaagtactcttttttctgttgaacttattgtccaagaatttcataactcttaagatgtcaccttctctcaatcctaacgtacgcaaaagagaaggtgtgatgtcttccaagatgttttcatcaatctgctctctgttgaagttaagagtgtaacgctgacagttaccaatatccactccacactgaagaaaaaactcaaaccagtcatattctggttcactcgtcgtagtaaccttggtagtggctttgggtctggaaggttgtggtggtgtgatattgttaatagtagcagtagcagaatgagacttggtaacagccatagcaccattagctccagaactgccattaatagccccagatgaaccttcattagtaccgctcttagatggagacttgttagatttggatctcttcaacatttgtttattgacctcttgcttgtaagtttccaaagaagtgcctgtaactttttcaacgtactccaaatcctcaatcgataactttgtcgcagatacagcaatctttactccattcgtcttgtgcaaatggatctttccttcaacacatcccaagaactcagcttcaactttgaacgagccagaactatcgatccaggttctgactctgtggtagtttggcattgatttatcattctgctcatccttcgatgaggtatgcttcctatccctttgaatcctatccttttctctaatcttgtctctttcttctctgccacgattatgatgatgatgcagatgctctttattgttgtccacaacccttcccttggtactactccgtttgtttgactttcttctctggggtccatctgtcaatttatctaaattggaagtaccaattatttcgatgtaagaagatggaattacgccttgtcttccagaatcgatattttcacacatccaccaatccttagacttggtctcatttataatatagacttcgtcgccttctctactcatcaattcatcatcaccctgggcctcaaaatcaaacattaatctacccatttttctattgttttctccggtactggcgtgtgaagctctagctacttccttcaacccacgagcagactcggctcctttaagatccccaacgatagacattatggcttcagcaacgtctttggatccagcatgtaactcaatagaggtcttgggattcttgaattccaagaatacatgcttcttctcatggctaaaatcgattaaatctttaattcgccattggttatctatggaagaagacgaagacttaagtctgagtttcttgggactggtcgtattaggtctaattatgatcataccttggccaatagaaaatacaacagaccgctttttacgaccgtctacttcgtcaatgtaccatgtgaagaactcaccatcaaacttatgttcctgaccaccagtatgaagatcttcttcgcgctcattctgaccactgggagggagctctggaactggcttatcagcggccacaacaggtctagacggcattggtggtggtgcctcttcctcgtcgtcgttcccatccacgtccacttctctttgtctgtatgggctttgttcgtacgaataagtctgagacacagctggaggacgagctgatgaaggttctggtacgtgattttcgaaaggttcagcctctggagaaaccgttctatccttatgaaccggaggaggagcaaagttgctgataggaacaggttgtttctgctgtggctgtgtttgtggtggtggagcttgtgcttgtccattcaaatcaatgtagttggaaggcacaaatccaaagctctgcttattggcatcgcctaccaatatccaatctggatcattcaaatcatacacttgaaaaatttcaccttcagcaaatgagagttcatcttcagtttgcttgtcatagtcgtataaagctgctgctgttttaagcacaggtgcctgcagtatcagttagtatttgctctatggattcaaattgttaattgctcatacaactctcttcagatttatgtgtaacttacctcttcaatgtaattggatggcaccaatcccactggctcctcaacttcttcattgcctgatggtaacactctctttttcactttccaccaatcatcgatatccgatctctcaagtaagtacaacaaatcatcgggctgcaagtttagttcttcttcagcttgtgcagagtactcatagagcgctctgtacaccccgatatacagcatctctattgtcggattgtacaatctggtcttttcttaagctgaatcggatgggatccattttagataatcgacactttcgcttcacgacacacggactggaaaaggggaatctggtaccgacacgactacgcgcacttactatggggaaggagatgagggttggctatgttactggcttcaatgaaatttgcattcgcaaccctttgcaagattccagattcttagtggaatctcggttcatagctatggctagtactcagagtttgtttgaattgctcaagcaatatttcagaaattgtcttttgctaagtatccttttctaatgcttcttcttagatggtaggaattgatcttgtctacccacacattattcttcatagtcagtaatgcggtaatcctcaatgtctaaatctagattctttggatcaatagcatgtagatcataggtggtgcctaatcggtgaaggaagtaaataagctgtgataatggaacgatttcaggtgaggcagaagagggcagatttagatgagtaaaggcagacttaaactgatcgaaacctctatccgtagtaatgggaactgctagcacatttctagctagttgagaaagagtaggatactttctagcataagtactccagaaacttagaagtgatggtccaacctcttttgcatacgagtttctctctgtctcctttatttccttcattgaagacgactcgtaattataacattcttttgtagacttcccagagcagtcgaatagatttagaatcatgtcatcgacattatcgaagctatctatggaagttggtttttcattttcttgttctttggacaacgactccacgaaactgtttacagcgtttacatcgtcatctcttaagaatcttttcgttgatggatgtagataggttgcgagaatcaaactagaattcgcttcaattttggaatgggtttctttaaggttatcaaacaactttttcaaaggtaactctatgttgaatgaaagaagttgagaatgcctttttgtgatagttagaacatgtaatatcaacatctttacccatttcgagagcaaatgactgacaggtacgtcatatgaaagagtggttataagtacttcatggaacttaatggtgatttcgtaagcgaaagtaatcaactcccagtctgattccgaaatggaagatgtactatctgatataagctgttcgatgttggccctataggttatcaagcatgataagatcctcattgtgtaagctttgtcgtggctatgttccaatttcttcaaggtgccccagcaaacacggtccttgtcgtctggaagtggatcaagcttttcaaagcttaaatggtgaaacttgatatagataggatagataaaattgcatactaatactggaataagtttagcccctgttatggacccgatatcgaagacagctagcttggtttccaacagcaagatctctgccacttcgatgaagaaactcaacaagtattcgccgaaaagtttggttagacagtgaaactgactggattttgtgatgtctccatcttcatccattaggtatttcaccatttggagattgtaatcatctaggtcgtgattggaagttacaaagagtaatctttctttgagaacaggattgggtatcaagtgttgtgacatattcttctccgtatatggaaaaaaccccaaaggcaattcgcataaacgaaatctttcgttgatgaagtgatagttggcaaacacatatggctctagtgagtttgaaggagtccatttatggagggatagggatatctttattgctttgtctaatgaattctcaaaatagtgtttgaaataattctggtattcagagtacatttcgttggctagatgagtcaatgtttctggatctggaataaacgataatccattattgaagttgaagagtaatctgaacgaagatgaattaatttgctcgaatggaattagatgttcaatacagagtagtagaatacgttttgataattcttcgttcatcagtttcagtcccgccttcttgcgggcggaccttgaattagatacttttgtgggaggagacataatcaatattgaagagttggaaagtgtggaatcgaagggggatattggttatatttatacttttcaataatttttcatgtgtataattcctttttgcagcaattaaatcggatctcaaatcaccctccaaatatttctccgagaattcactatataaacaactctaatttctacgctgagcaaatttctttcgcaaaattccattcccatataccctaaatgttctctatatactaaataaccttcgcgttcactagtctctggtagtctcggaaggcaattgaacagttctatctcggtagactaagtagactccaatagtctttggacactaatgtttagttgactctagtaattgtgtcttctctgtcgtacaacaccgtctcaatattgaacatggcagcagcggcagtataattgaagttctcggtggtggaagagccaatgtgtggtgtgagaacaacatcttgtctgttgagcaagtctgggttgatggaaggttcgttttcaaacacatccaaaccagcaaagagaatcttgccagattgtaaaccattaacaagagccttttcgtctacaacgtagcctcttccgatgttaatcaatctgaaaggtttggcaaagtcgtttatcatctcttcattgaccatgtgtctggtatgagcagtgcctggacatgcaatcaccaccaagtcagcaatgttcttagtgtctttcaaagtagcgtgataggtgaccttgtaacccaaagaagcctcttcttgttctgataacttcgatctcttaacatagtggatgttcattccaatacatgctaatctctctccgatcaacttaccaatgctaccgaagcctacaatgactacattgtgtcccctcggagaaaggatatctcttccgcagcaagaagatgcaaaggcaccaccgacagtgggcttgatgacggggactccgttaaactgatcaaactcaccacgaaccaaagcagttctcaaagcaccagtattggtcaattttcctcccaagttcttttcaaacatcttgaagtttctgaaactggataaggtattgtacaacaccaagtctgccacagcttctgaagcaatgaccgaagggacattcgtcaatgtgatacccctcttcagcataccctcagtgtcataaccatcatgaccaatagagcagatagctactacctttacattgggagggcaatgtctcaatacttcaccctggaaccctcccacgccatcaaaaccaccccagccagcatatatggcctcaatgtatctcaatctaccttcgaagtcttcaatcaactgtgatttcgatgtgatcttgtagttaatcacttcgaagttggctgaaaactttttgtaagcttcggtgttggtgttaggcttgcctacaaaaagcacctgctgttttaacgtcattttgcaataataaaagtggctgaattcgcgattgtttttaacttaagcggaaaagttaaccaacaaatattgcaaaatatataagcaaatgtaattatatactcctgggccaaaaggcatcaactcctagggatatcccttgtatttataatcctaccacgtcgtggtacctgggccaataagcttgcaaaattttatctactgtggtatcaccgagttgcgtgcggctcaacgctttcttgttgcaaaattccatcttcaactcgctgcgcgcgtaagcgtcgatagccgtcgattgccatacgttccgcgctgcttcaaagtaggagtaaaatctactgataagagtttgcaccacgaccaaataataccagcaaccgagtcttttaaaagttgcggtttgtttgagaatgtgaagaacatgattactactattagaaacatgacaattttgaactttttgtgaacatgttcagtctgtttttgtaagctgttagtgccctcatttacgtgaaaaattcgctataagttactttgctaaatggatactaaattttacgagattaagcatttcttttctacaccctctttagcatgttgctcgtactaaaggtgtcgctgcctggtttgcaaccatggtatttttctgttgtttgtcgtttctccgctctcttatctacccctcgagtctaattggtcagtacaactctcatacactaaccacagtaattcattgcaaactcgaatatcttccaactatgttacaccgaagtattgtgaatactatctttatgcggataaactctcaggctgctacgccaaaattgttgctgcgaagtaccttagagatcctgtttgatcatccgactactctacacactggtttaataatcgtttattcatttatagatgcttgctattaatcatcttaaatgtataaaatgaacaaaatgtcaagaaattggcttttgtaaaagtgtactaacaaggactagtaaagtgttgaggtcatatttaaaatgaaggttaaccccttcacatagatataaaaagatatgaattttattctctctgatttgtctatcactcctaattacaagaagtaacctatattgaatgaaccagtcggaaaaggaacttcatataaaatgtgcataaaataatggagtcaatgaatatttgaataatgagggcatgtcaagaaagctgtctatacaaagcgcttaatgggcagccatgtctggttcacccaagtacttggctgccaagacagtaccacattgccagcatctagacttcttaccttcttcgaccttcatccagtatggcttgtggtcttcaccgtccttacctctgcaaccaacatatctgtaaccaatgtaagttggaaccaagagtgggtcttcgaaagtaccctttccttcgtagattgggttttccaaatcgaaaacatcaataccttccctcttacccaagatttcaagtctttccaaaccagtagcctggtccaagtcagtaggaatggtaccggccttggcacctggaccaatcaaagatccatctggaccagtgacttcagccaagttcagggcagtcttaacgttggctggagcagccttgtgggccaagattctggtagaagacaagaatctggtttgtctggcaatacgaagagaacgagagagcattactagaatacgttagtatatgaagaacgatgaatggattgaacgacaaggtataacaaagacatgaggaatacatgagtctcgattgaatctttttagattgttattcgggttgattaagtatgatcctctttgcttgaattgattccaggttcctacagaaatatgttgtttaacaagatgataaattctgtgaggatacatggataaaaggaaaagaaacatattcataagttgatattactggttcattttgtattcctctggagtgattcatgattccttgatttcaattggataataggctaatggcagatgagataacgaatagccaatactatcaaaacataatgaaatataatgaagtaaagagctattcacaccaaaaatgatagctgttgtaggtacatatgcatgccatcttgtgtatgtctacggttacttcctaatggaatattgttcatttttctttcttgaattttcatttttcagtgttcgtcaaagattggatattgttgtgatgatgagactcaattggcacgagaattctggactgaattcatctgtcgttcagcatccgactccgggtgcatgtggccacggtataacgtactattaatggtcttgaatagattagaaggaaaattacagagaaacaaatcccgttgtctatatttgtaatttgctaacagtattaaatttttctacacaattgaaaatcagctaattttgatggattgcaccattgagaaagatctttaatttcattggttcgcgcaggcaggtgacagggctcatgtgatatccatcatatgatttgaatcaggtgctttcgtaatctgaatcagatgatttatcgtcatgtgatactttgggttgtcctgacgccaagtgcgaagtttgcatgtttagggttataacccttaaaaatgacatactcacgtgcacatttttgatgcgaatatttcgtgcgcagcaggatttgcgcacagctgatgtcgtctttcagtaactaatgtcgcatttcagaacacacctcaccttagattaggtcgcgctctctttaatttcagtagtattaatgtcgctcgttcaacttttgttagcgttctttctgcaggcccatagttaacagactcgcactcagattcctttgggcgaccaaatatatttaaaaatttttcttcttgttcttcttttttcagattctacttacatcagtatagtaataggtatgtaataaccagacgatatacctgagaataaagtcaaagatcgatgtggatgatgttgaagaatagcagtgagaaagagtgagagcgacagactctcgagaacccaaaatcgaatcaataatatcaatgtgaagaagtgaaaaatcctcatttaccagttgacattttaattagcgaactccatcaccgtgcaataaatagaatgcctggaggcgaaattatcccgaatacagcgacgaggagtagacccaagcaatattgtctgatttaatattcaattgaatattgacatcaaaatttttcagatttgccatttttgatattggctttcttttccaatacagacaattgtaataacaacatgctgaagtctttgatattctcaaccctcatctaagcctagtactaacataactttagttcaacatgccaaaaaagagagcttccaacggtagaaacaagaagggtagaggtcacgtcaagccagtcagatgtttgaactgtgccagatgtgttccaaaggacaaggccatcaagagagtcaccatcagaaacatggttgaagccgctgccgtaagagacttgtctgaagcttctgtctaccaagaatacgctttgccaaagttgtacaacaagttgcactactgtgtctcctgtgctatccacgccagaattgtcagagtcagatccagaactgacagaagaatcagaactcctccacaaagaaagagattcaacactgacagaaaagtttctccacaagatgctgctaagaaggctaactaaatttgacccagaattatagtttcatttattgtaatttaattaattgtatattgagttgaatggtttagtttaggcatttgttatgaacctacataaacaccacgtataaagactgatttgtagaaaggctggtaatcttagttccggttctagttgaaatagcaagaccaggaaattttggctttaaatatgaattacgagagagctacgtaaggcaggactatctactttgagctagattattcggcatactgtacagggactacatatgtaacacgaccgtagtgaggatggcgtggtcatctagttgagccgggcgtggacctgaaacaagcggtggggagtcacgattgtggtagtgagatcacgataagatctttaccgagactaaataggaaatcatcaggaattacactcgcagtcactttgtatttctccacagctgttcaatagtgggcttctgaattgttaaacaaatgaatcacctcaatttgctgatgttgatgtgttcttctgcaattgctagaaggagcagagtgcagagtgcagagtgcaacatttgctgtggatactggacaaagtttcggtaaagtctccctaggctagtgagcaccggcgtggattccgtccagtaccgcaggcatttccgattctctcgctagaaatacgatctgttggtacatgccagagatccataagagttcgagattaagtcgggaccgacaatagcaataactcgtacaacaaatgtactaaccaactttttcgcatgtccatcatggagaatggtactatagattagaatacaatagtaggtactcttatagcatggctattgttctcttgctccattacgctctcacttctcagtccgagctgtgcctaattaatctcgcacttctcgctatttcctcactaactcccgccatcgcgccattttctccctatccgcacttgcccactgcacacaggacgacacccatcaaaatttttggccccagtagcactcactaaatgttcttgttcagcgtctccttaccacagtctttttcctagccatccaacattgccccaccgccacaggtcaatctgtctttttgtgtgtctacaactttctgctgtgccattgtcaaccacccagtcatctgtagctgtcacgacatagcctccactgtcagagctgctctcaccacaaataccgattctgattcgtccaccgcactcatcaacacttgcaccgaaatcttatcaactaatatttgacattagaataacccagttaacatataaaacatacgttaaattcaccatttcatcaatacgaacttataagataccatccacatttgcagcagtcaactactacaattatctatacgataccaaccttcatcattcctgtatatctactatcttacaagtcttccatatcctatagcaatcatatacaatgactatcgaagaatcatggaagttttcccaatgctttggtgataagggcgatatcgaaaacatcaccgaagccgatatcatctcgacggtcgaattcgatcacaccggtgacttcttggccaccggagacaaaggtggtagagtagtcttgtttgaacgcaaccaactgaaaaagaagctgaactgtgagtataagttcttcaccgagttccagagtcatgatgccgagttcgactacttgaagtctttggaaatcgaggagaaaatcaacaagatcaaatggttgaggtcttccaacaactcgctctatttgctttccaccaacgacaagactatcaagttatggaaagtcatggagagacagatcaagttggtaaacgaaaacaacttaaacggcttgaaccacttgcctctgaagaacatcactatcaacaacttgaagttgccccagcttcaattgcatgacaagctcatcctggcccagccaaagaagatctactccaacgcccatgcctatcacatcaactctatctcagtcaactcggaccaagagacgtacttgagctctgacgatttgaggatcaacttgtggaatttgaacattgctgaccagtccttcaacattgttgatataaaacctaccaacatggaagagttgactgaagtcatcaccagtgccgaattccatcctaaccattgtaatttattcatgtattcctcatcaaagggcacgatcaaattgtctgatatgagatccaactcgctctgcgacactcatgccaagatctttgaagagtacttggacccatcttcacacaatttctttacggaaatcacatcgtccatctctgacgttaagttcagccacgacggaagatacattgtgtccagagactacatgactgtcaagatatgggatttggccatggagaataagcccataaagacgattaacgtccacgaacacttgagagaaaggttatgcgacacgtacgaaaacgatgccatctttgacaagttcgaagtgcaattcagcggcgacaacaagtcggtgatgaccggttcgtacaacaataacttcatgatctaccccaatgccattaatgccaacaactctcctcaacaaactgctgctcccgtaaagatgccttcattcaacacgaattcgttcaagaaaaagaagaaccgtcacgacgaagaagacgaagaagacgaagaagctgatgaagctaaagaaacacatacttcccctctagaagatgatgacgatcaggaagaaatcatcttgcaagcagacaagtcggcattcaaatccaagaagtcgggtcacagcaccatgagacgtagattgatgagtggagtaggcaccaacaatgccagcgactttgacgacatcgacttcaagaagagcattttgcatttgtcgtggcatccaagagagaactctgtagccattgctgccaccaacaacttgtacatcttttccacgttgtaaatgccctggaaaagattctccgctacgacttcatttatgttctttttccttcatttcactcttcattgttacggttggttattgtaattgtaaagtttccaattctatggcttggttaatcccagtccataacccattctatttcactgttgcttttcttgtgatgtatttcccataatattgattcctgtttccttttacttcgccagcgtggtttactacttgatactcgattttgaaaagctaaaaaagaattataataatcatgaacaagaataaagtctagggtaatgttcaaaagttgctttgcactaataggtattattctttctgcatcttcgttgacatatttcattaaagactataatatacgtatttataaaagagtgtaggtaattgtattttgaaatgctataacattaaactctaggttacgatgcacaagcatatatcataaccatagcattgatttacaagttcatgatagtgtagagtcttacatcttttctaggtatatggaagctgcctgattatatttctacatcgtagctttgatccatgtcatagtgaaatatttctgatagaacatttattgtctactaggtgcacagcaagaatagagttcataaatttcagcgatgtaataaaatgatataaaagctaacgcatacatttgcactgtcctattagaaatgccagtgtgcttggagaataataatatgatgctttcaacagacagacgccattgaatatggaaaagtgacgaaaccacgacgcttagtcggcttggatgtgtctgttgacatcagagttccagaacaaggtcttgtcaccgtcaccccagaagaatctgtgctgtctcaagttctggtagtcgtattgaacttgccattcctcgtcagtaaggtgcttcaagtgttctctgtgttcagcatgcttcaattcaacgttacctactgggatagaagtgatgagaacagctgggatagcaatgaggtaagtgattctcttccacaacttggtgataccctcagagtggtggactttttcttcgtagttcttgacaaaggcttctccagcggccttgttgactttggctggggcataggcagcttcgcttatgagcttggaaacgccgtagccgtggccgtgcgagttgaatctcttgaaagtgagttgtggggctcttctgaacatagtgttatgcttgctttgtcaatggaaagaagagtaaaccttcgtagtgagatgtactttccagttgatatgtgaaaaacctcacaccattttttcgggtgagatttcattggcttgaagaaaagcacgtgcaccatgtctcgtgatgtataatgagcccactacgtggtgtaaagttgacaagtggattttagtggtatctggaagccaattcaggtggaatatgacttgctgctatggctctaatctacaaattgagccaggatcttatttagtcattgtgcctacaaatatgggtattttgattttttggatacttttagtacatattccatgaaaattacaaaaatactgtaatattcaagaatccgaaaacagctggaataattaacaaacatatcaaatggtcaattaccatattgtaaagatactaacttactcttcactcttgttttgtcttccgtaagtatcctgtctattttttatatctacttctctattccaagtctctattgaacacgcaattctcaagcgcaatatgcagctatgcctacgttgcaaccaattgtcaattcccaatcgaaactgcctcaacttcttcaaacttgttttcagtagatttagtcttctaaaattgaaattataatgcaaatctgatgacttaaatactatgcttgttatgtttattcactcaatcttctaataaataatctgatctattaaagctttggttacacgaagcaaacatttcacgacagactcactcaaccaacttgggaagatccttcctggttgatattttcttggtttgtgtttgttctgctggttctaccttttctggtggggtttgcatctcaagggaggatataaaattgacagtctgatcaatggactcttcgaacttgtacttatcatggaacgcagatagcgaaaagctgtcatgtctcaatggatttccttgcttcaatttgccagaagatgtgaagaagcgttttggatcatttccatctcgcatgctgattaactccaattcgtgtctttcagtaacttcccttgtgactaagtattccataagaaggtcactgttctcactgagaatcttcaagcattcttcttctgcaaattctaacaccagaaccccagttcctttctgtctaacccctttgttctggaggcttgctttcaacttcttcacaggaatccagtttctgatcctaggaatgaacgtgtaaacgttgaaagactgcaacttgatacttttttctccgtattcagttgacaaagctgattcaacctgattagggaggtaggcatattcgccttcatgcatcagaagcttcaatggcgataagtcagcaagcctcaggaagtgattattccgacaattgtatacttgcaaaaagtcgtttctcataaactcactaacgtcgctattgccaggtgttctggccaactctcttgtcaagaaaccgtcgtacctaccaggagatggggttcgagatacagcaagacctgtgatgtccacatacaatcctgtgtcaacatctatgaaacgggcatctatgaaattattggaattgccacgttctctagaactcaagaaactgccacagtctatgaaataacgcccatatctaatttcctgtgttactggatcgttacctatgtctataatcaaggtttggttgaagttacgtgaaagtttatgcaattggtcaattggcatttgaacatcgctatcattatcccatggaaacgacattccatcccagtaccaagaaagcaacgtcccgtgtgcaatccaagtagtgatgtcttgagagtttgtgaacctgaaccatgcttggatcaactgatgtaatgctggctgatgcttcggtttattgttgacaactccgttaaagaacctccagtcataatgggccccaatagcaaaattcctttctgactggaagatcttggcttcgtggaaatacttgggaggatcctgacaaccaatagaatattcgagagcttcaaaataggacttttgatgaagagtgaacttcgaaacatcctctcgtttcatttcacgcaagatagcctttgattcatctataaactgggcatggtcaagtgccttttcatacttaagagtattgactggttgaagcaagttaggatgtttgtttgttgcgtcaatgaaagcactcaattccttctggatattaagagttaccggcccatcgcctccattttctactttaaacatttcaatataggaagtggcaattccagatttgagcaaattcttctttgctttagtgatgtctctgtctatttgaatgttaattgacttttgttcaggtaaaagcatgagaatggagtatggagccaacatgaaatcgtgcaaataggattttgctaagataggtcttaatttaaaagtagatcttcctggagccgtatagatgtggaaaccactggagtattgttgttctttaatgactctcaaattgtccaccaacgtggagtctgtggatgttgtgagaagatcgtcgatagtgtcttcattcaagcaatacagttcaattggaaggacttccaaccttgcaagttttgaacgtgtaggcggaacaaaactaaagaatttacagtcagccttgtctttcgaatggaagtattggttcaactcagaaagatctacgaaatcactccagtggaagtatggaagaacaagttcatctttgtctttgatttctcccagactgatttttcgggtaagatagtttgttatcaacccaacagtgaatcttgggtcgaagtgttggacttggggttgtttcttggtggtgtctattagatagtctggcaatatgatttcgttgaagtcttttctattcttaaggtcagaagaataaagcaacttctcagtttcttcatcctggtttctgattattgtttgtaatatgctgtcaaccttttggtcgaagccatcactaggctttttcgtgtatgaattttcgagaagagcctttttcaagtctagaatgctttctttgaaacgatccaaggtgtgggtattgtcgccgaacttgaaaagggagaatgctattatgtgaattagaagcactgtggctatgagaatggtccctcgtgaccttctcattttcatagtcattgatgtggtggtaagactttgaccgaaagatcaaaacgtaaaccaaactgtgaaactagatgaaagtgaaaattggatttttggtatcagtcaaaagcgaccaccgtgaagtgtgaaacactataagggggtgtgaatgttttgaaagtggtgattcgagtttgtgacagcgtatgcctgtcgttgatggacgagttttctgttttaccaacggcctttccgtatctgtcaactctagatcttcgcaatctcaagtgtagataagctgaaaagtttggacagagcgtgaagaaaagcgaagtttttaaattttatagacaaatagctggaccccaggacaggtgttgttgccagcaggtgtagagacccactccaggctttgatcgagatttctaaattctttttctcccaatctaagccatcttgtgccgattcccactatggtgccaatgaagatggcttgtctgcagtaaaaaaaattggaataaaatagtcctgtcatacggcaatttttctgggcattcgtcacaatgcgtgagcgtttactaaatccagcaagaggtgttgtgatttaatctgatcttatcgatcttatctgctgcgacggctacagcagtgtagacagctcaggacgttcagactggctggcactgtttaagtggacttggtcgactagttcctgtttgccatgtggtgcctcgagtgttttcagatggggaaaatgtcacaaggcttatgacataagaaaggactgaaacaataagcccccggatatcaattgctacgtctagaaaagacgagcttgtgactcttatccaatacaagtaacagttgctgccctggcacaatggcagtgcacatctccattgtggatttgagcaaacagggttcatggtagcctccggcgtatgtcggtgtttgatttctataagtgtgtgtctttaggagtggatattatactaaaaacggaaattattattcgaatgaacgaacctcaataaggcagaaggcttacagaacaaaagcagattattgttaatgtttttattttcttcagcaatattattatttttatcattattcaatattattggaattatctgctcatcgccacttcattaggaaactcgttacttcagaacaaaatactccacaactgatccacatttgcttagcgataatgtagggcacctcctcaataatcgtgctattgtagtcgttgaggcgaatattgtgtccattacagcttttgcttaatagacacaaagagtattgtctagtgcttattaacatcctgtcgagtgtcctgcttcaagaatgtcttttatactcagcgagcaccaaatacgaacaccgtaagtgatttatgcaaactataaatttatttcgtactatgttaacctttttccagatatcgctactaaacagtgtaattcataaaaataaacctctcttaagagaagtaagtgaacattcaattgagcatagctaaatcttgagtccactgtgcgccccagaatcttgagtggtacctcttttttttacgaaattgcatgttttatgtacctcaataaaagtctcactctcaatttagtgtgctgtttccggaacagttttagattcggcgaaacacaaaccacacaaaggctcaagaaaaacctaaaagcatcggctaggtactcgatccttgcacgagtgccccgagttttgcaggctggcaatatgatatcggcccgattctttaaaataggcacatctatggttcacgtgaacagcactagagattttgttgcagccatcggatgaacatatcgcttagcttaccgaaccctagtgaatttgtgggctctataaactgggagaactttgattctgcaactataaaatagttgaagatggtcgacagcatttataacaaataacctacctcagtcaagccttcgaacatgtcagctaaaaggcttttggaattaattgaagctccagatttattggtttgtcctggagtttttgatggtatcactacaagaattgcccacaggctaggagcaaaatgtctatatatgacaggtgccggaacagtagcttcaaggttgggaatgccagatctaggtattgcaaacttgaacgatatgcatgaaaatgcacacatgattagtggtatcgccggcgatattcctgttattgctgatgctgatacagggtatggaaatagtaccgtgtgtgcacgaacattaaacttctattctcgagctggcgttgcagctttgcatgttgaagatcaaatactctccaagagatgtggtcacttgttgggcaaggaattggtgagtggtgaagaatttacttccagaatacatgcaatggctatcgaaaggaagagaattggatctgacattcttattattgcaagaactgatgctctacaagaatttggattggaagaagctttgaagagaatcaaatctgccattagtgtaggtgcagacattgcgttcgttgaaggaatcaaggacgagcaacaagctaaggcagttgtggcagctctcgccccaactcctgtgttaattaatttagtccccaacggtttaactccaaactggagtacaaaagaagctcaagatttgggattcaagttggcattgtatccaggtgtatgtttaggtcctattgcagttgccacccaaaagtctattaagaatctttttgaaacgggtaagcagattgaattgcaaaataacgaaacaaaagctgatccacgggagtttttcataacaatgggtctagaagaggttgtgaaacttgacaaagaagttggagcaaattccacaacagatatcatctagttcttgacttgcattgtatatctacataactatacatactagttagatttcatttcctgtctctgagggaaagctaaatatctgattttcattctgaaccgtactatcatcccatagtagatcgaacatgttaccgaagaaggtgtcgatcatattcgctgtcgaacttccatccgaactggaaacttgcatgacttggtctatgctggtgaccagtacatcatcatctagactttttgttctcatgtcttgtgatgatgcctcttggatgttagctgtttctctccgctctgctaactgtgctcttttgaatgtaagcaataaactccaaaacccgcttgctcccattctggttcttactgtaaaaatcggttcattgattagcttcttagtgtgtaatgtttgcaaaccgtttaataatctcatggcccttgttgctgaatcatccggtcgcctagccaaattttgcattattctaaagaagttcgataaagagtttcttgccatgtctttatctatcaatgattcatacgaacaaatgcttaacccaaacaatataatggcagacatagttgtagtcacaactacaaagatcggcaatgcgattgtaccttcttggtcagagtcatgtagctccactaaagtttcaatacttttgacacacaccaagtatagtgaagtgacagcagatttgcgatctttttccaacgtatctggagctagaagaaacgaatgaataaggagctttgcgtgtagacatattaattcgctgacttcgctgcaatgtgaaaattcagattgaacgagagataggttatctatgattgctttgtgctgagtacctctgataattggatcaaccattccgtagtcggtgtcagagttacacccaagggtgttcaatgcaacctgaattacgtgacatactttcaattgaaccttaaattctgccaagtattcattaccatcgatcttgttcaaggaattcacaagcaaaggaagagaattggggattccgacaaatgagttaaacaaagtacttgaaataaagcaaccagcccacgcaatgctggctgcttccatttgctgtcgtagtgaatcatcagctgaaatgcaatactctcgggaatatgaaagttggtgtaagccaatcttcattgctagatttgttgcacgactgatatacattaaagaatcgtcactttgtagacttgcagttctcaatggccaatagcaaatgacaagaagaccaaaaatagtactcaaagaatgaaaaggatcaatcataaatgttgagtcgcttgtggaaagaagctctcgcaacttcatttctagaaacggctcaaactctggacaacaagctgggcatgctgcatggcatattgcataaaatagtaacttgtagttcttttcccagagaaatataggatctaataagctctttgatataggtaaatgaagccaattgttaagaaagaatgtttcaaacatcaaccttactttatcatagggaatatcaggatctattacattttgacgtaaggtcaataacgctggaaacaattctcgattattcgatgaaatgggcggatggttcagatgtgctttcagggtcataagtgaaacatttcctgtgttgacttcttggaaattccgagctggcgagtcgtccgatgaaccaatcatgacattcaagaaatccttgtgatcgtgcggtttaaatactctggcggctctcgccggttctctcttgaaaccggaatctatttcacaaatatgacctagtctttgacatctcgtgcacttttttggaaacctctctattgcatcacatttcaatttaatctgcctacaaccagtgcaggctcttttggatcttcgatgcttgactttaccttcgacagccatgacacttcttttgttataagacagactaatacattgaggttgttttgataaattataccggcagatcaatgtagaaatgaattctaattaaaattttgaagaatgatttttcattttcaattttgagatcatttttctttataacgttcgcataaccataaccccacttattcaatactctatagttagcgataggggaattccccaaattccgaatgattgtcctcggtacctacttcgatctgattggtttccgcataacattgtttgtcttaattcttgtagaatgttttataactctcacacaattctaagttattggtaaatctggctaaatgaaattccttcaaaataattgatatatcttcaaaatattgatttatttatttaagtatttaaattgtagaaagagcacctaatcataatatgaaggttgcaaaaaatgaaagttagctttgctttgtaaataatttgaagtttcgcagcaaaatttaccaagtcatccctttttcgctatgacaggacacgtcttcaatggtgacagtcccacaggaggaagttggagtctcggacaactcagactgtaattgacggaacacgtctttgccgtgttttttgaatctcttcaataagcctccactagattgaagcttaagttccaaattatccaattggaaagcatatgttgttccattcacctgaacctgtctgcttttgactaaaatttcaacagtttctccctcctgagcagctttgtaaaatccttcatcagcgacccggataccgaataatgagatattcgcttgatttctgttgtatatgtaagcgaatgattttgcaatcaccgcttgtactccacaaagtttcaatgcttctggtgcagtttctctcgaggaaccacttccaaagcctctaccagctacaataatcttagccccttcgtgaacctttttcacaaaatcaggtctaacataagcaaaagcactagtggctaagtcatctttacccattttgtctattggaatgatcgcgtcagtatcaacgtcatcatcaaatctctgaacccttgatttgattacttcaggtagttcggatagttcctccttgtacgccatcaatcttgtcaccttttctggagctatttcctttggctctgagtacataatggattcttgagaatccttccaaaaaagtctgtacttgtcgtactcgtttctgtcaactctatccaaaagataacttggatcagtgaccttcatgctaaatgatgaagcagcaactgtagatgaagaagcgagattagcgatggagccctttcccatccgattctcgaaatttctgttctgtgaggagagccaaacttcacctggagctgcctggtctgctcccatacctacacagtagctacagcctggagctccaacagcaaaacctgccttctcgtaccattgaagaagaccaaattcctttagtcttgcaataagtacaagtgatccgggggtcactcttctatgaccacgttccgatacctttagaccactttccaaaccagcttttagaacaagtgcacctaagatcaaatcttcctcagctgttgtgcatgcccctacaaaacatccatcaagctccataccaagtttctcagtcactggaacgacgttatcgggcgacgggaacaaagcgatatatggtacaacctcacctaaattaatttctctaacttcgacataattggctccttcatctgggcggaaatataatgaatctcttttgaagatagggttctttcttctgtttatgaaggctgatgtttgttgatctggaacaaacacaccagcaagagcaccaaattcagtagacatattggatatagcaaaccttgcatcacaagaaaggtactgaagtccttgcccatcatattcgacagcacgatttgaagcaattgtatttcttttgaactccttcaaaatatgtaatattgtatctttaccaccaattccaaaattaggtttacctacgatttctatcttcaaggtttcaggaatttggaaaaatgtttcccctgttatcaatggaaacacaacatcagaagttccaagtcctacagccaagcaccccaaagcaccacttgagcatgtgtgtgagtctgccccaatgattaacataccaggttgtgccctttccctgtagaattcagtatgcataatggtcgtattaggaggttgatagtccttgatgtccaactccttagcaccagcttcagccattttaatcaaaaattgtggtttagccatgtggtttattcttggatcaacaatatgatctgcagctagccaaattctgtcatttctatgtaccccaggttttccaagcctgttgtagatttcatatagtcctgaccaactaagctcagaagctactgtccaatcaacgctgacacataacaaatttccgggaacaatttcagactctcctagggcgtgctccttaagaatcttctcgattaaattcaacggccggcccatgattgcttcttaacttagcagcctagtaaatttcacacttgatgaattttgcatggggttttataatgacaacccctttcagactgtgatcgttaacagcataattgtattttgaatgtttttccatgacctcatttccgaaatctctgccaacttcagacttaccttcaagttaaaccggttgataaatcctacttaccgaagtattcgctaagttatccgaaacagcgagacgcacaaacttattagaggtcgcaaaaaatatagtcggatgtctatccgaaaaattatcgcaactgaagcttccacatagcggaagtctcgttatcatcagatatagttacaattcctaaagcaaagcataatagaatgatttcatatttttatttcagttatgttcctatctcaattttctcgaggaaaatatttaaggcggattaaaactctctctaatccttatcccatcgattttgagtaatagtgagtaatagtcgagatcaatatggatttgtctttaccatatgataggaagataaatagcagaagtgtaaccacggagcttagtgaatgggttgcccaacttaaatgggaagatgttccagacaaaattaaggatagaacaaaatttttgatcttagacggcattggatgtgccttagtaggtgctcatttgccatggtctgaagaagcagtcgaagcagttttgaaatttgaaaccccaggaggagattcaccaatagtgggctggaaaggaagaaagacggggcttgtctcagcagctttactcaattccacattcattcaaggtttcgagctcgatgactaccacagttacgctcctttacattccaattctataattttgcctacacttttgagtttatgttctaaagatcccagcaagcattcagggagagactttatcttagcaacaatagtcgggttcgaagttggaccaagagttggcaaatcaattgggggaagttctattctctcgcttggttggcacagcggtgctgtcttcggtccacctgtggccgctgcgtctgcctgtaaattcttgagccataacgccattcaaattgaagatgcttttggaatagcttgtacccaagcgtctggtctcatgtcggcacaatttgagtcttctgtgaaacgaatgcaacacggttttgctgttaggaatggcctattcgcagcgttattggcagattcaaattacaaagggatttcaaaggtctttgaaagaaagtacggtggctacattccagttttcactttgggtggtttgaaacctaaacctgaagagatatccttaggcttaggtgaaatttggagaatagaaggtaccttagtgaaactacacccttgcatgggagggatccattccacatgcgaatgtgtagaagaactagtcaatagccaggaggttgattctaaaaatattgaaggagttaaaattgaattaggtaaagcagcttttcatcatgggggctggaaagcacagagaccaatcaatgttattggtgcacagatgaataactcatacatcgccgcatctatatttgttgatgggtcacttcaaatgaaatcttttaccgaagataaattgaaccgtgaagaagtttgggatattgtaaagaaaactcaatgtgtagaaaacaactttgagggccaaattgaccctcagttcaaattatgcactcaagttacagtaacgacgaaggatgggaaagagcatatatcgagggttgtcaatccaaagggagtgttgcctccattaaccggaaaagaaattgtcgaaaaatttaaaaatttaactaacaatgttattactaaagaccagcaggataaaattatcgaaacagttttgaatttggataaattcgacatgtcttgtctattagactccttggatattgacactagcaacccgcttgctgtctaaatggctgcgaaaaaaatgcgaaaatagcgaagataatctccgattgcaagaaagatagggctcataacatattttgggaaattactgctagtgtttcatcacatttctctactgctgaggcagaagttaagtattttcagtagtagaattacaatttaagtgacttccgataaatcttaaatcttttgaaaaaaatagttagccaatttacaatttgtagtccatatcaattagaaggaagacaagtgaaccaactagtcttgaactgaattctcaatctccactacctgcccagtgggacatctatctattctaccattatcacatccttcctaacaggaccgggttcccccctacggacaatttgtctacaagtgacgggcccatcacttaccttttcaacgaacttgaatttttcattcctcaaaggagataatgtgcctggagattgatcaaattagacaagtacttcaataactaagttatcacagcatttccatttaatagaaaaatttacgtgaacctaagccgaaagttcaaattaccatcttccaaaggtcaaaatgatttcagacttatgtactgcatacacacaaaaggcttttggttattaggtacgatcaaaagtgattcaaccttgagtccacaagtcttggaatatccctttcacaatgaacaagttcgccaggctcagggtggcatgtgttcagcttaacccgagaataggtgaggttgaagccaatattcgcaaggtacacacaatactagtcaatgtaccgaaagtagatttggtagtacttccggaattggctataacgggctataacttccccaaccgtagagcaattgagccatatctagagaatttggccctagagaatggaccctctatcaagctagcaaaggaaatctcaaacaagtacaaatgctttactttgattggataccctgaaatttcgaattcaacaatttataactctgccgtattggtaggacccaacggctcaatactacataactatagaaagacatttctctatgaaacagacgaggtatggggagcaagtgagaatccagaaaaagggttttcgtctctaaagcttgtacttgataaggaatactatttggacaagcaggcaaacaaaacatatccaactgtaactacaaacatcggcatttgcatggatgtaaatccctatcaattcaaggctccgttcaatgcgtttgaattttcaggctcggcattccaccagagagccaagctcctcttgtttcccatggcatggctatcgccccaatcaccttcaactaaggaagacttgaccaagagtgagaagttgaacaagggcaagatattcaatgaaaggtacttctccacagaacataaaccaacggtaaatgacaataacgtagccccaaagttggagtctaatactttattcgtgcctacaactccagaaggtagcacagtaaactactggcttctccgtttttttccattcatgaagcatcccaacagttaccagtccaaatactatgagactgccacgcttatagcctgtaatcgtgtaggggtggaagacgatatattgtatactggatcgtcatcaataatacaattctctggaacttcatcttcggctcctcaaattgatagtgccaaccccagcgttaatgtgcttgggagtttgggccaaggcgacgagggagttttagtaagggatatagatatcgaatttgactaatagaaaactgcacttgcaataccagaccacgagtcttattaaaattatcattattattactaaatacttttactattatacatgtttacttagatcgtttgatgtaatctctatagattccattactgactgtcttgatagcatgacgaccttcccaaataggagccaacccaatgatgataaaggcaacgtataaccaaattaacccaactacaacataacctttgtagtatgcagcagaccaaatccaatcacggtacaatggcaatggccataacacccatgtaagcaacaaaccaacaacaacaccaattttggcaactttggaatagaaattcaactcggctggatcagctgcacgaactcctaagtcttcttccactgtgaaaacctgaacattttcgatggtggacttttctttgatggcagacttttcaccttcactttcagattcagattcagattcagatcccgtagccttgatcaaaagcttagcttccagcaattctttccagtcaaatttctttgggaaaacagtcaaactgagaataatacttacaacggcaggaaggaacaaggcagtcaaggaagcgtagagacaagggatttgcataccaagagtgtcgatagtaatttctccatagagtttattggtggtagtgatccatacggcgaaaccgaagaccaatccggtaataggagcgacaaaggcagcgattgtggtttgtctatcccaagtaacagtgaaaataagtgggaacacacctggacagatgacgatggacatgaagtagcccatccatgtcatgttaacattaacgtagtgaagcataagtgtgaaaccagcagcaaacaagccgaaaaagacaacaccgaaatgagcaactcggatcatctgcttgttgttagcttgagggttaatgtacttcttgtagatatcgaaggataagatcgacgaaacagaaatcatttgagcactcgaggtagatgttacagcaaggtagacagtcaacaagacagcaccaacaccactattacccaaaacagctttgacagtataaggaagaacaaagccagagtcgatttcgaactgagtcatctttcttgggaaggttggaaagctaggatggccttgcaagatgatactggcacctccgataatagcaccaattggccaagtgtttgcaaaaatcaagacggctgaacccaagtaactaggaacagtagcctttacttcagcagagaacgacttttgccagaaagaagagtccatgacagtcaaaccaaagttaccacaagtcaaaaccaaaccgaagatgatagaaccttgagacttaccagtaagaatagaaccttgataattgccttcgatatatctatcttgagagtgttctaacaattgagaataaaggccgttcaaaccaccgatttccttggaagcaagaaccttagtgttgatgacaatcaaaatcaacaacaagacgaaagagtgaacgtaatcagtcaagaatgttgctttcaacccaccaaaggtagtatacaataaaactccgaatggaataagtaatgtacttgcaacaattgaaaggtttccagaaatgatcgaaatggcaccactagcagataaaagcatagaggaacatgaaatcaagttggtaaccaaacagaggaacaagaaaagtatatgagtagcctttccatatctcaaaccgacaatttcaagcgaagtgtgagcttgaggagctctctttttagcactgataccaataagagccataacgcacatctgcaccgataaaccggccccatagtaaaacgaggcttgaacaccatagttgtagatcatagacactgtctgcaaaatttcatcggcccaagaccaagaagcgtaaacagaagaacacgccaagaaacgcttcacacttctatcagcaacagagaaagtttccgtagaagttgcattttcgttgagatacttctgcaagaatttggtagttaagatcataccgattgcaaaaacggcaccaacaccgagcaacaccccataaccggcaccttttggaagcaaaaatacagtatcagtgtccgacatttttagaatgagacaatgatatcttatctaaatacagataggaaagacgagagataagatagcaatcctccgctctatatatagagaggtagcatcgcatgaatatccagcacgttatagtaaaaattcacaaccagtactgccgcaccgaagaatccaagtactttgcaacgagttgcctaattcggccactaatgatccaccacagctgatctgctagatcaactttaattggtgagttcctttttttagtatgacattaaattcagctaattaatattgaagggcattcgctactgtggtttttggggccagatatttcattggtggcagactaaggatttgcgcgcatccatgaaggatcggttcggaatgaaaactgtggatccaaaatgtatgtgaagcttgctcagtcatcctttatgagagcatgtcttcagcatttctttgggattgtagaagcggtgtggctgtcctgtagatgcgaaaaattgcaatagctaattagggcaaaaattgcaacacaatattaatggagttcagcttccacttccgctgttccaagaattaatggaactacgactattgaagcaataagtggggaccattgtggttccttgatcttctcgtatatgccaaatagcaattaacggatatgatcagattaaattgaatgcaaccttcttctgcagaacattagattactgtgtggcatgtgactggcagagatccgacatccgggccgatgtaggacttcagtattatggacaacagcacaaaactgtttacactagccttcgacctcttacatacacggtaggtcgtcccacttgtttgcaagaacccggcccttggatttccagccttgtttgtatacatatagtttggctccaccccattctaacaatgcttcacgcctcgtttgagcgtatacagcgagtcttggctcagtatacaaggcttgggactaggtggtatgtgggctaataaatttacactggactaaagggaacatacttgtgatctggaatgtaatttagaatgggagttcgtctcgatctgcaatcctgctttcagatcagattgtcgaagaaagagaaaagtgaaacatacgaacgctactacgtatacgacaacaagatcgcgtactgcctatgagagtgacatccactaagttgaatggtttgaaagggctatttgtttgtatccaggaagcaggctagcgattacatggtgtagaatgacaagacaagagaggatcgactagtttcccggtggaatgcgtacacaaagcagtcgtacagtattttaaaactattgggtagttgctcatactgtgtgccttgcaggaggcttcctatttgctacttacacaacccaagctcagcctaaagttagcttttgcgacaatcaattgccggtgacctggcggggaataaggtgtttgaatttccaagaaaataacgctggtgaattcctgctgcgcaaagagatgataaaatatatcaaaccaatcactgcaacaggtggccgggaaaataagcattagatcaataacctccctggtagaaggaaacgtcagtaccgtcagcaatctcttttttgatgccgcacatctccgtctcggttttggatcccaatgtggctaatcttcgcttaaactaggcaattatggtcgtgagactcggtttccactaaaagaaaaccgtcaggcgccagatttggcgcgtaaaaaagaaatttttcatgtacgagttgcctttgttttcaatttttcacctatcactaaaaggcatttaacaagggaactatttttttggataatctccaccctgctggcagctttcaagccatttggtgaacatatatacaaacccaagacattcctccattgctgaaagttgtaaatgctctgaaagttgtatatgatctgaaaaaagaaaaatctgtcactttctttctcttccgaaccttatcttttttttgccagtcttcccaacggctactgcaacgtcctcctggagtatcttagataacaaaaattattattgtccagatatagtgaggatctttttcataaaattataaatcgaatatatacgttgacttttcgttgcatctggcgttgccaatactatgaacagtcagccaatatcaaagatcttgaacattattgcaaccatgttgaaatcctctttgagactccagcgtaggttggtgctaaaggtctttgtagtactatttctatgttgcaccattagcattttttaccactcagcaacgaatacgtcaggagttaccagatacaagaaaaatcttgaaaaatcgatgaagttgaagttcaactacttgtacaacaattttctttcatcgcacctcaatctcgactccaataaactattccgtacgaagttcgaatttatcaagaaggaaaaattagaaaatgactggaacaatgaattatggtacattaacgaagatgttctacaaaatttgcctgtcgaagtttctataccaccattctattataagaataaagttgcaaaaccgcccatattaccgtttgatccaaggttcactctagccgtgtactacaagtatctcgaaaagcaacacactagtaaccctggttcgccagtggaagttccttttcactgggccgattgggtagacttatcgaaattgcataagtacgtattgaacacggaagaggacgacttttgcaagcgattattcgacctttcggaacatgaagaactcatcaaggattccaagatgaaacccgttgaccaatactgtttgctaagtgacaagacaccattgggattcgaaataacagatttctctggtccacagagcccatctaatagagaactcttgggaaaggcttacctctatagcaaggctccctcaccggtaaagattatctttttgggaagcgacgacgagaagggatctatacaagcagatgttcaatcctacagtgtaaatgactacaggaatggtttactccacaattctatgatcaaagacttgttagatgcgaaagcaatcgacgcaaatgtgccattaaacgttgtcaagacattcgaagacttgttcacgaagaccacatctactgttgaaaacgcacaattaaaaggacagtcaatagaaataccacctgaatcattctatgtcagtggaatgaatgttatatcagaacttgaacaaaagccaagcttgtcagagacagaaaagaactacttggattccatgagattctcgacatcgacaaatgatccaccaaagtttttcaatgaagcaatattattagccaaaactcctcaaaaatggctaggagaacactacgattggagattcttcaatggtttgactgttggaaacgaagaacaactcttgtcattacatagacttgtgaagaattacttaaactttgctcgtcagaacggtataattacttggattgcccatggatctttgttgtcgtggtattggaatggtatagcttttccttgggataccgatatcgatgttcaagttccaattctggaattgcacaaattgggccgtcatttcaaccaaacgattattgtggaaaatgccggagaccgcaactacaattttgacggattgggtcgctacttcgttgatgtcgggtcctccatcacacatcgtaccaagggtaacggcaacaataatatcgatgcaagatttattgatatagataccggtctttacattgatattactggcttatcgatttctgaaacaccagcaccttccagatacgacaatttcattaacatggatcctgtgaagaaggccgtagtagatgagcatattgtcaatggccaacttaaccacgtcgtaaagaaccaacaattgagagcttacaactgccgtaacaaccatttcagcacatacgaagagttgtcgccattgatgttaaccctcgtggaaaatcaattgagttacatccccaagaactttgctcttaacttgaactatgaatatgatgtcaagggactcacagagaagaactacagagactacatttacttgaataacttcaggctttgggctaagacacagaacattttagactaccagtcgtctcccgcaagatgggtcaaacagtacaattccaaattgaataacccaaagagtaagaatggagaagagacacaaaagaagaagttttcttcgaagagggtagtaggagtggctgagaagctcgccattgggcaattgacggtcagcgatcatttgaacttactccaaaaaaacgatgtgttcaaggaagtatacaagacgcttcaatttacgaagttccacgaaatggagatggagaaattgctccgttcggatatgaatggtgtgactaaattgttggaccaatacaaagcccaggcaaatgtaggtggtggattgaggccagatatattcatgaacaaacttcaacacgaaactgataaacaaaacttcgtaaaggaagccaacaaaatcgcaaagctttcggaagtttaccagaagctaaagaaagcatcgaaagagaaaacagaatccaattaattgtaaacgatacactttgaatccgaggaagtgaaatcgacttacaaaactaattccagcagtatgcgggcaccacttatagagctggagctcgatcacatagtgccttatttaatagagcagtttgcaactgcattgttttacttctagtatttaggttttatcttgtgaggtttccaccatttcacaagatcaatagtaatgatgatacgatttgataattgagtttatagtttacttttgggacgtgtttatgcgccctaattgacaacctgacgcgaaagtcgtcgggaatttagttggtatggttaaggttattccgaggaagtttacgcggggaagtttccagtagagttcttatagccttaaaggtgtcccttgtatacaattgaacaatacgcgttgtggatagtcttacattgtcgtacgttagtttgcaacctggattgtttcctaaatcaatagacgcctcgacagacatgattaatgtcatttccaacttcaggcgtaccaacagcagagccctaaaaagaggctatacctgtcacgagttcgggcgtataaggacgacttccctagcattttgttctcttgcatgtgggggtacaagggttcttaatttctgccacctttccatcaatccatagtgatacagtcctgaaaaaatgtatagatcttttgctcagctgtcatataggtgtgtattgtacttaagtgggccaaaatgggcattatcaaaaagttgtcaggacgtgaaaaatcgtcagaaaaccttcattgctttagctttgccttcttccattccatgttctaaaaatacaccggcagcagcacgattactcaccttggactgtgtagcgattactctgccatcatatggcataacgcaaaccttgtagctagcgatattcctgcagcgggttctctcttagtcttctgtaatcttagcctgcacacaattctagggggttctcttagataggggcaaggcggcttgggccccaaccttcctcttatgcgtgtcttgcaatatgaacaaccacctgcatgtaaacgaagcttattctacatacacaatgccacacacataccttaaattaatcgactgatcctgcgagcctgcatagaatctgtgccgaacaggaaaaaacactggcgtctgcgcagttacatcaagattattttttattgcattactattttaattttttttatgcccttgattatggatattctataatggatactgaattgctaccaatagacaaggctaaaaaaagaaaattgcccgaacatctttgcactgctggattcatgaagccatcaggggatataaataaaaactaattccctgaacttttgaaattttgtcaattcttgttttcatatttataacagtaactagttcccatccaacttatactaatctttcaaaaatgcaattcaagactgttatcgttgctttgaccgccgctaccgtcgtttctgctgcgaacgattccaacgcttctaacactaccaatgccgctgcccctgttgccggaaactccaaccttgttggtgttgccgctgctgctgctgtcggccttgccttgttgttctaggttaagcgaaacaatttaaaagtagagttgctgaaacaattggaaatggcaagaattacggaattttcacttctggagtgattgctttccaattataaagctgttttttgagttttttaatatatgcctggcactcgtggtgctagcctggtgctttccataactttactggtgtctttttaataataatacggtgtgctttatactatacattctactaagtacttctttaatagtttgttcttgaaatgttgatctatagcaatgccaatctagttcaatttttatatgttttattaatttggatatatgtgtgctttggtagaaataaatggattatttcatcaagttgtagggcaagaacagcgtggagagatgcctatttacacactacgatattttgtcaagggtttaatagtttaatattattcactagggcatttcaaaggctttccacggcagtagagaagtaaccgggatgtgatttactcggtgggtttgcggcatacctggaatcggaccatgtcttaaatgtatagagttctagcaaattccataattataagtatagtgaagaaatattgagtagaacgaaactattttttgtgaactgaaaaacttctacattgtgaaggtttgggaacacaaggtaagaacgtagtttaactgcttccatgtgggctgtgttcccgtcaaaaagaaacgatcattccatattaccttttggaagtcgttatcacctgtatgtggatagggtacaatcttatactattgtgccagaccagacgaacatggttgaaaatagcaatagcagcgtgccctggtgaaacttgttccaaggctgtaaacccatagacattttcacttcatacttgataaaaatagaacttcttaagttggaaagtgtagcaataggtactcgaattgtgtatctatacagctcatcttattctttactaggtgcataatagagcggcacatgtaacagacatgtgccatagattctggcttcataagccccttgaacaaattaacattactttcctaaaatttctgacccttgtataccgcaagttggatttttatggaaactctaccacttttcaaatgaaatgacaatttgggaaggatttgcaacttttagcggaagctgttgaataaagcttatcgcttgcatcgagtcagatgtcagtgcttcacaatctaaaggtagataagccgttaggcccactggttactaatagggatcagcctagtggaacatctcatctttctttctactttaaccagaatgttgtttgactctcatgcgattggatgtagccccaatgacaattttctagccaattctgataacaatgagagggaaagttgcatatgcaaccacttatctgcaaccttgcttgggactgtacttgagcaatgcccgtattaagagagatagatttccatgaagaacgtcatgtagatttcacatgtttgtatggtcctttgttaatcttgttacatttctactaacttcaatagtgccaaagtccatttggcaagaaatgctgaatatttgaaatgaacacaaagaatacggttcaattaattacttaagtctctaccaacacttcaactctattgcgaacatttgatggtagttgttggcatgtagttctaatagtacataagcgtggttaatctattgcctagtttctggctgtatgggttcaaagcgaaccagtttttttctatgtcaccgatcacctctcgcatatcgaaccgcagatactgaaacgtttgcgatgtgggacaaacttagttttcgagtgtcaagacacgacaatgtcctggtatccagaatatgtagccaagttattcttgcttgaataaaaggatctagcaatcaatctccagtttggatcctgcatcacttgactagctttcctctttagttcaggttgcgaagtatagttatatttataagatactcttccacaaatacgatgcccaaacggttagtgacggcgtgtgaatactgccgagtacgtaaagtaaagtgtgacaagcagattccatgttctacttgtaagaaaagaggcaagcaatgctcgaccaggcgtgtggtgaattcaaaagctgaagggaagcgatctcatttacactatgatgtagagctgttgaaactaaaacttaagctgttagatgagcaggcaaactttgtagacacggtggttccagcacccaacacaaaggaagattttgactttatcaatatctataaggattatactaaagtatacatcaaaggtagagagggtcggaattgttttggaccattgagctggactactttgatgaatagtgataatgctctacgctcatcttggaactacattgaagatcacaagatgacagagttgtttggcaaacttgaactggggtcaacagactcagtgaaagactttgatactgaccatcaacgtttggctggattggtagttccttcttcgcctgtttttgattcaaccattcgattggattcgaagttattgtccgttttagcgaatcagaaagtcatatggacattaattaggaggttctttagggttgtgtatccatatgtgccgttcattgacgagagagactttcgtggtgaaatcagcaggttgattgatgatgagaattttgaggtggtacctgtcgtcgaattgaatatcagaggacatttggatttcgctacacttggaattttacttgtgatactaaggttgagctacctatcctacttctccaatgacttgagtcacaatttgccggacaatatcaacacgaatacagtaaagaaccgagaactcaagttcatactagaaaaccctatctctatgagttacatcgtgttggcacaatcttgccttgacgaattcaatatttttaacagatcaaacgtgacagtactacaattggccctactattaagaacatacagacacttggctcccgaagaaggagatggtcctgatggtggggactcgatagtgttgaccagcacattggttagtatggctacaaatctcgggctcaatagagaaccagatgaatcaataacctcgaaacgagagtgtaatctattcagaaagttggcaattcatctaaaaaatcttgatacaaccgaatgtgtcagcttcggaacgcctagtggggtggatagacggtattttgatatcaaatgtcccttttacgcacttgacaactccaacttaattgacacagaaaatgaaagagaagtaatatctgcgtacatgaatagcgggttaatttacaaacagttagaggagacttacaattatgctatagatcttagtaagccagcaaatgcccgcttattagatttgaaattgattgagctaaaggatattttaatgatggatgccttggaggttatgcctcaagactacgccaattcgtttaaggttaagctgtttttgttgggagaacaattaatattgtcaattcaatttcttttgcatatccactacgaaagacaaagcaattatgccaatagcaaagtctacattaaggaaaccctccgtacgatatcctcgcttctacctatactacattcgatagtagaaatccagacagatggtatgcatatcatgtcaattgccccaattctacaaacagtgtttgtcaaggcatttgtaattgttgtttcggttttgattagaacaaatgtttccattcaaaacgaagtacgaggctattctgatatgtttagtctgctaattatgttgtcggttgcgatgaaagactggtgtgtggaacttctagaattattttctatatttagcaccagatactactacttttggcgtatattgagaggttgccatggtctactcaagctatgctttgctaaggatttctacgagcctcttaaaaatgctgcagatacgcatggtttgcatttcagcaattcagatatacatgagattctatcaatttgtggccataatctggatggtgaaaattcaactcaggacctttcaacatctataataagtgcggctggaattccaaatgtgtctagcaagtatatttcagatgttgatctcaatcgtttttgggtagtcttgaagagccaatcaaagtccaacgctacaatgaagcgattccagaacttgaccataagcgaacagtcagcgtcagttcccgaagaggaaccggaggaatatgattttttcactgagttttacaatgatttcttacgggaaactggataagaattttgacacatcaaaatgaaattgctgcaatttacgaagaaaaaaatattttcggccgaaaaactctaaaatgtccgcgatagcggccgaaaatactatgtgattgcaaaaacgcggacttcaagacccacttgtaacgtcaaaacatttccataaagtccaaattaaagaatataaatactagagctattcagatgtagtttgatatttgttcaattacaaacatcataaaccaggcgcttattttttcaaagaattaattatgacaaatactattgcaggaaaatcgtcccttgggctgcaagcctacgaaactgattctagctctattactccagttattgtttcaatcgtagacagttctgaggtgtcagttaacactgatgatggtaaagaagggaaaatacaggaacctattctaaatgttgaggacagtacaagtggtgaaacttcaaacgagcagtatctacatggaacaagactctgggcttgtatggtttcagtcttgctgtgtttatttcttcttggtttggatcaaacaattgttataaccataatttcagaagttggcaacaagtttaatgcgattgagaaagttgggtggttatcttccggtttcttgctcgcggtatgcatttttgctcctttctggggcaatttctctataagttttggaagaaagacaacaatgattatttctgttgttatcttcgagataggatgtttaatctgtgctttggctaacagtatggaattgttaattgctggaagattcattgctggaattggaggtggtggtattcaatcgacttcttatatcatctgtgctgaaatcgttccgattgaacagattcctttgtccatgagttgcatagcaatggtttatgccttgagtaccatcgctggtcctctagttggaggagcatttaccacccacgtcacttggagatggagtttttatatcaatttgcctgtcggtgctattgccttgctccttttgatattttcctggcacccaccaaagtctcatggaactttgaaggaaaagctaaagaaaatcgactacctaggaactatcctcattattgtcggtttagttcttatcttgctagctctcacttttggagcttcttatgaattcccgtggagatccggtcttattatttccttcttcattgtgggagcgttgttcttggttgcattttgcatttggaatttcaaatactctcacaatccattgattccgctcagtgttgtaaaagtcccccaaatcaatgctgcggccgtgggtatgggattcatgtttgcttacttcacagctactacactttacctttcaatttacttccagattgtcagaaatagaactgcatttcaaactgggattgctttattcccaattatcattggggtggttcttagtagtggagtttcaggataccttctgaaattgaccggtcatgtcaaactatgggttgtgtttgctggaattctaggtccaattggagtcggactccttactttgtatgatgttcataaccccaattcccaagatataggtctacaaattgttctcggtgtagctctcggaattcaattccaagcgctcctcatatcagcccaaattaaggctcctactgttccaggagggaaaatcatgaccatttcctatattgtcttcgccagatgtcttggtggagctatttcagcaaacttagctgatttggcttatgcttctacgtttgtaaacaaattcagaagtcttctctccaagctgacagacccaaccattttgagtgagttaggatcaatgagcccatacgaattgcttcattcttccactcggatcaattcactttctatagtttcccaacagttcgtgaagaaccaatatgttgcagccatcaacaatgtctattacatgtgcattgccttcgcttgtgtttccttggttggatgtattcttacaaccaacaagatgcttcctcaggaagaaatctctaataatgatgcaacagttgttaaccgtagtgaaaaagaagacgtcgataatgcagtataaatgattttttcaatttgcacccatttacttatataattgtgctactgtatttttttcaatttttaagtgtattttgagtaataattaacatgagcaaaaacaaattcctatataatattaatcaaagatctatcatgtggttcgttgtttaaagtcaaacttagctgggaaatgtcctgattgcaaaataggagcttcgttgcatatttaaataataaatatgtatggaaaattgcgacatccctaaaactggtaatttgacttccttgcggcggcagcaattgagaatacaaagatgttggaatcttccagcaaagagatacacaacattcaagtcttaaagtgtaaagtcatattcagcgtttattaccatagtggctaacagagaacctattaatcagagatggtggggtagcctcgcttatataatccggtagctcctgtgattatccattcacgtgataattctttgcccgttttttctccacgttagcataagctctgcaagatttgataaccattcagaaaccatagaaagattaactaaaccatgtcgggacaagcagacatggagatttccgcagccagaagaaaggctactaaagcttcagttttaagtgaagagcaaaagaaggtgagtactttatttgagcgatgagcctggggatcctaagttaagggtgaaacctgtgacaatattcgaagctgccgagattctgatttactaacttaggcaggcacaccacatagcttcagaacagaagagaagagaaaacattcgttccgaatttgacaaaattgtgtcgttgacaccgacattaacggagctggagaaccgttctgaattgaatatcttgaccaaaagtgctgactacattgaccagttgagagaagaaaatgcaaatttggtcgagatgtgcagaaggaaaggaattacgattccagaagagttggtttataatggacctaccagcgacggtagtgatattgccaagtagttacagaagctactgaacataacgaaagaaacgatcatcctatcagaacaacacgagacacccatgactttttgtcgatctacttcttcttcaatctatccatacgtagttattgtataaatattgtattaacctatttcaaaatatactagtctattgtttttctaatttcgcaatcaaggcatatctgaagggtttacctttgttatcaaacactgcttgaactggcaatacaccaacagcattcttcccaacaattgagaagatgtcaataaagtcattttgagtcgataaaacctcaatataattagttttgttgtacttagcgataaagtcagttgcaacagtgctatcatcagtgaacaaagtagctattctttcactattactgacatttacaacgctacttgtgtcgaatttactgacatcttccaacaatacttccttgccttgatcattatcttcgtcatcatctgaatcgtggtacatatccaccaacttctcataactgagcccaccccattctatatttgctcccttaggcaaagatttgactttgacaattaccatttgaggggagttcgaagaactttcaaagtcagagttgtaagcatcccatgcccaagatgccgttggaacataactgtttttagtgacaaagcatattacctgtgcaagcttctttactcccaccaaactcttgactttgtgaaggtgttccaaagataacaatgaattatatgtgatatcagcctcattaagaaccatactacttgggactaatgggatttgtccagatagtgtcgctaatttgtaagtttctctttgttctactgttgtctgtgaatatgggccaatgttttgcggtgcccagtaagaccgagagcgaatatgtaaacctgtcttcttgtctgcgttttgatctttcaacactatgcaagataacattatagaagagggaagttctgtctcaatacagattcttgatggtggaagatataggttttcgaagctcttgctatatattccgtttactttttcgaatagagacatatctgacaaaagcaaagtgatatgctgaatgttgttgaagctgagcttagcgtcttccaataatgaggctagtttcatgaaaatatcagccgtattctcttctgggctatctttgtcggacattagattcgatatatacaattttgtctccgtagacttaatgactacatccaaattaagcttttcggaagttaagctcttcggttgagtttctgtttccttaatctgaagagtcaggatatcaagaactggtgctgaaccgagaatattggaaaattcttcttttaacaaaggaggacaagcgatcttagtccattggaaatgttctttgtcaagaactttgacctttactctcaagtatgaaacatcatcactggaatggtcgatcacttctctgtcagtaatctccaatttcttcttgaatataggagaatctaaaacaattgtttcaaattctcctccttcaccacatatatgaacgtcgtacatcagattcaacttgaccaacgtaggaaacatttctgttattgactttcccaacatggttgagttaagaccaatggctgcaacctttataagtctagcatccaattggtatctgatcatctcttgcatcaattcgtactggtctcgctgccaaagataagccaaagaagtaagattcaatcttccacatacattttcgaccctggttctctggtaatgtgaaagaatggctccacaactgacggctactacatctggatgagcttctttgaccagcttcaatagtttgtacaagtcttcgatctcgtcattttcagtcttggaatactccaacagctgatttgttgaacctcccgtgatggcctgtctataaattggaacacctaagcattcagagtagctatctatgatatcatgacctacggtctgaaacatgaatgaatcaatctcatccttgttctgttcctcaggatataaatttgcaagtgctaccaattcgtgtccattggaaagacaatgatgaatattgaagaacgaatccttgccaccagaaattaaggctacgaacttcattgtgaaacttgctttgggtagtagcgtagatattatgaagtatgaaatgtcgcaatcaaggttatatatatttgcaatgtcgcaagagatgcaaacgacattattagttaagatatgttgaagagatgtccaagaagtgctaaaaaattgagtaattactgaaaaatcagtggtttggagtaaagaatgtcctaatgcatcaagactagtgagacaacgagtctggttcgaaagtacccacaagaaatccgttattcagctacagatatgatcatcttttctttattagaaagagaccgaaaatttaaagaagagaatttgtaccaagtccagtgctttttctaacaagaataacatactcataccgcttaaaagatagaagcattaagagagtttcgttactacttatctattgattgcaaaaagtaggttccactagaacgggttgcgtatgcagtctctgattgagcctgaaaactacgcttacagctacaactagagagtaaactacagaactaagtacaggcgagtgcgaaaatttttttctgtcgtctctacagtcgcagctgtataaaagaatttttcaatcctcttccaattttttttattagtttctccttttcttcatcacagaagacagttaacatgccacgtatgtaatactagatgatactaacagaacagcaataacttcatacaaatgattctgcaccagctctcgagttgttcgctgtttcattgaggttcgggtcctcgtttctttgaattacttcagagataattttttatttattggggctgaattcccgacacttcagtctcaagctacataacgcaagtaaccttgagttagcatactttgtatgttactcttgggtcttcgactttgccaagctataccgtatcaccttcagggttgattttttgaatgtagaagttcgaaaattctagcacacctagacggtgaaaacggtatattgcccagcaagttacattgagtgatgtggttttaaaaaattagatctgtagtaactaagtaacgtagagtgtacccgtgttgttttgtgcccaaattcttaaaaacaatatgctaacatgtaaataggtgctccaagaacttactctaagacttacaccgtcccaaagcaaccttacgaatccactcgtttggacgctgaattgaagttggccggtgaatacggtttgaagaacaagagagaaatctacagaattggtttccaattgtccaagatcagaagagctgctcgtgaccttttgaccagagatgaaaaggacccaaagagattgttcgaaggtaacgctttgatcagaagattggtcagagtcggtgtcttgtccgaagacaagatgaagttggattacgtcttggctttgagaatcgaagatttcttggaaagaagattgcaaacccaagtcttcaagttgggtttggctagatccatccaccacgccagagtcttgatcacccaaagacacattgccgttggtaagcaaatcgtcaacatcccatctttcaccgtcagattggactcccaaaagcacattgactttgctcacaactccccatacggaggtggcagagccggtagagttaagagaaagaaccaaggtaagggtggtgacgaaggtgccgaagacgaagaataaattacttaatctactaatatcattcttgtatttaatagtttatcttccccttttctcatcaatataattggtttttatatttccattcatttcattatgtagattatcaatatatttcagtatttcaagtacaaaataaagtaaacagtagttgaaaggccacaactggaagtcaatggcgtatacacaaattatgtcattcaccctgaatgcagctgcagttgctaacatcatatacggctatagccatctggtacccttcgaaaggatagcactattgatctcattcacatcattattagtcacgtgaaatatcaatatatgagggcttgtgccctaatgaagcttcctgcagtaccattcctgcgaaatgaaaattttcaattaccctcaccgtttgcgaaactggctgcaccatagaaaatttacctatacaatagttattagagaattttctgtttctagattttgatagttcaccaataataattaaagatgggtaaatcgtaagtgacatatacaacagtggagatacacagggaactatagacagaataatgaaagagctaccatacgagataatgatcatgaagaatgtcatatcaaggatgactatttgtaaaacaattgggaatgaggaataagcaagcaagaacttcgaatatcttgtgggtatttgaaaaagatataaaagactcgaatacgaaggtcgtataatccagaaagattgaagatgaccaatagtgttataccatgaaatgtagaggagagaaactagtggagaattcattcaaaaccaggttctgatagtattgatgaactattcaaggagcatcagttccattcagagaatattcagaactagagataaagctaaaatgaaaaggatctattccataagactatcaacgataactaattcatctatagtacctgtatcaatatttcttaagttttcaattactaacaccttatagtcgtggttacagatccggtactcgttacgctttccaacgtgacttcaagaagcatggtactattgctttgtccacctacttgaaggtttacaaggtcggtgacattgttgacatcaaggccaacggtgctgtccaaaagggtatgccacacaagtactaccacggtaagactggtattgtctacaacgtcaccaagtcttctgttggtgtcatcatcaacaaggttgttggtcacagatatcttgaaaagagagtcaacttgagagttgaacacatcaagcactctgcttgtcgtcaagaattcttgaacagagtcaagtccaacgctgctgctaagaaggaagccaaggccaacggtcaacaagtccaattgaagagacaaccagccaagccaagaggttccagaatcattaccactgaaggtaacattcctcaaaccttggccccagttccttacgaaactttcatttaaatggtttatttatatttttgtgatagaatcttgggacactcatacttctaattaaaaaattaatgcacgtagtaaaaagagcaagagtgtagagaatgtagagagtgagaaaagcaacatgatacatccatctaactatcgaagtattcctagaaactcggaagcatttcaattctgacatttataccctggaaagtcgacttgtacttccgcacttctttagcgagagaacaacaaactctctttgtagcgcatagcacgtgactcaacaacctgatcgtagttaatattaaggaaacacattgtactgatctgattctattcttctaaaattgtagattatcttaatgtcagaagaagctcctcccgttcgcctggacttggatgtcaatggcagtatcctgaaggaaggcacccctgccactgctggagggaagaccctgaatatgttcctgaatgcccttcaaacatggaccgagatcgatcttccatccttgcagaagaagctagacgagcagggattggaattgaaagacgatcagaagacgtctctactcagtagaaagaatttggccgcgaaaacaaaggagtttcggaagttagaagactcggaaaagttggagcagttcaaacatcttttgaaattgtatcaaaacgaaattgaccagcttaccaccaagaaaaagtctgtagaaaactacttttttggcttttatagattgttagcagaggctcctgatccacgtcctcttcttgaattgtctttagattcggtactagaatcgtcagagactgactcgttgaagcgtgagatcgagagattgagcgacgaattgactaagaaagcagattatgaccaattgaaacagaggttattaagaaacgaacagaaggctgctgagttgctcagttccaaattgatcgccaaagaggacgagttcaaagcattaatcgaagagaaggaaacgaattggttggaacaggagaaacagttcaagttccagatcaagaaggcacaacaacaaatcgaagaattgcgtacttctaaggaagtcactgaattacaattggactctcaaaacagacagcaaccctcaggcgagtcagcttctgcttctgtattggctgaacttgacatggtcaccagagatgctgaatcatctaagaagagaatgtatgaattggaaagaagaaacgaagagttgcgcagagagctttccaagtcgaaaaatgatattgagatccaaagtttgagggaagagtcttccaaaaaagtctcagaactcgaaggagaaaatgcattgcttcttgccaatcttgaccaaaccagaagaaagttggagaactcttctaaggaaaactcaagcaaggtagaatctttgaacagagacatttcacagttgaacgtagaaatcaagaatctcaagactcacttggacaagaccagcgactacgatgaattgaaacacgaattgcatttattaaaacaaatagagtttggccacgacgacgatgaaacggaaaataacgaagagggcacttccaagacgatcgactctatattgatagagagaaataaggtattgacccaggaattggctgattatagagcccagcatgaagacttgatgtctaaggtcagccagttggaagctgtcgtgagcgttactaatcaggaattgactaggattcaaatgttgaacgaccagttggaaaatgacttagttgagttccaagatgcttccaatagcaacaaatttaacgacaatgctagtataatttcaagcatgagtcgtatgacgaggggacccagaaatggcagtcttctaccaagttctgaggaaccgtctattttgccaatcatcaccaaacagagagacagattcagagacagaaataatgagttggaggaagaactcaagaaacagtacgctctagtaagcacattgaagcgtgaaataaacaacttgaagaaagacaacgaggagttgtacgaaagaacaagatatctagcatcattcaagcacaatacagaagtgtcacaagctgtatcttctagatcaggtaggaagcttcttcaaccaaaagctaatgtttctatcgatcttgaaagcaacccataccaacaaagctacgagagtaaattgcaccccatcgagcaattcagaatgcgcgaacaagagagaattaactccaaattgtcgcctttagaaagaatgtttatttccttgactagagccattttggccaccagagcatctcgtatgttgttcatggtgtattgtctaggattgcattgtgtagtcatgttcattaccatttacgccatgagtctaaacacactccagatccctgaagttggtctcaaccatagcacaggaggcatagccagcggcgaggcgggatctgtagatactttgcaccaggtcgcaggagatattcttcagaggtaggtataacctaaaataatgatatatattgcaataatgtaaaatggatgatgccgcctatagtataataagtaaatcatgtacagtgaaaaacttatctaatgtgaagtcatctttatccttatataatgcaaagcatttaattctagtacttatatgtgagtaaataacttatctagtagttcaattttatgaacaaattcatcaagttaaactgctaagaactgaatgcaccatatttgtcggttctaattctacatttacttacactatccagattgcttctccctcctttctcccatatactatcgtaaatgaagtcagctgcaaaatgcattgttcattaattgctgtgagctcacttatctgcaattttccatttgagtattaaggctctatctgaaacgttcaaaaaatattcacgtttagcatacgttatcattcacactacagcctcaccacacaaacggaatttcatcaccaatgctctaaacactggtgccattcatcaaaagggctcatacggtagcgctacttgtcgggtcacatggcggtgcaaccaatcccaaaaagggaggatcgtcatctacctgcgtagaatataattgccaccattgaatcaacccctgattctggaataggaggaaatatataaatccagcacaatcacgatgaatcctttattgttcaatatcttagtattcacttctttgtatttcttctacaagtactataacggaatggcaggcgaagaaacaaataaaccctctgctcaagagcaagagaagactcttttcgacccagataacttgatggtcaacattggtggaaaacaagtgccattcaacaagatcaacaaacctcaccacgtagtgcttgaccctctgttgcacaagcccaaggttgatgttgcaagcttccccgatttagagcctgaagccaagcagagagaagccgagttggcagcagccagagctggcgaaaaggcaaagaaggacgaataggatctggtatttataaaatcttggttatatagttaattcacattcttttgacagtctcttcaatcaattgattatgtaggggaactacagaggttgcgtagcatgatgtagacagttaggtggaagttcgaacaaaaaaccacaatgatagaatcctgaaacaatgggatgatataatgagcaaagttgaaagactactgtgaatctgtgatatcttcggttgttatgacttactgtaggtaaaagtaacaataagtttgtttaagttaacaattcagctaattagaaattgtacatcgtacctgtactacacatacacgttacacgcacatatcaaatccacctacacataatggacaattcatatctctctccatatctacaccaaactccatacctccggtgtcgcctcctaagcgatatcactccacagtattggcaagagaggttgcgtgtgtcgctgcaacctgcgacatttcccttgattccatacgcgacgcgacatcattatcaagaggatttctctaccagagcgatatataaccaagcatttacaactgcccttcacccattcttacagttcaattttctctacacacaatcgtctgaccatgatcggactcccgcggctttgggtccgccagttgggctacctatgcgtgttttttgtactagcagtggtgcttcttattgtagccaactcacaacagatcatcaagatccaggactatattccactgagccttacaccaactttcttccagcctgctgccgaccactatataatcgatatcgtaatccgtaattgctatggctacaaatcaaagcttccaggttgtggaaaacccgtagacagtgaaggtgaattgggctacctcggaatgtacggtgaatggaccaaagtcgacaaagacttgtcacttggctctggatgggtcaaacaacaatacctctcgtataagatgttgaaagcggacgttctggataccgaactcaacaaggttgctggaaaagatgccacatcgactatcaacagaagggtaattcttgatctcactgtagcaaaccctagcaaagatgcgaagatcaagggcaacgagaggtccaagtatccagccaaaattataaaggagtacaactcaaacaaagtagctggtgagctggatatcgaattcttaaaagaacagggcaagaaagaacacggtgctgtgacagaagcactcacagtagacaaggataaagctgccagccgtaagatcagcgaactaaatgcaaagctccacaaagagagccaaaggaaacaacagggtgataaaccaactaaggaattcgaagaagatatcagcccgcaagaccctgaagctggttcaaaagaggttcatgctgaagcaaatccggaagacgaactaaaggcagcggaagcaaaagctgaaaagaaactcgaaaaggaagagatagaaaaagaagaaaaagagcaaaagaaacagagcgaggaggcacagaaagcacagaaagaacagtttgaacaggagcaaactcagaaagaaaaacaggaacaaaatgaaaagagagtgctaaacaagccacttgacaagagagttgtagaagaaagtagacatggacttaatagtgtggtctacattccaagtaaggaagacgtaaagaacagtggctgggtagaaaagtcaaatggaatttgggtgaaatacggtgctcctagacacaacgctgtcacagcgattgatattctctttggtgaagatgctgtggaacctcggcccaactgggaattggtagatagtcctttgacggggacagctacacagtcagacttgccagcatatttgacctatagaaagggccccaaagcagactatagaatcaaggaataccaaccagttctcaaggtcaataagaatggcaagttcaagattttgcaagttgccgacttgcacttctccactggatatggtaaatgccgcgatccctctccagctctgactacaaagggttgtcaagccgatccaagaacgttgaagttcttaggtagggttttagatattgaaaaaccagatttcgttatattgactggagatcagatatttggcgatgcggcaccagatgctgaaaccgcagttttcaaggcattgtacccgttcataaagagaaagataccgtatgcggtgacaatggggaaccatgatgacgaaggatcgttgtcccgtaatgagatcatgagtctttcggctaatttaccattttctaaggcagaactaggaccagaagatattcaaggtgtaggcaattactatttgacagtggagggtccagcttcacacaatccagcgttgtcgttgtatttcttggatacacataagtattcgagtaatcctaagatcacaccaggctacgactggattaaagagaatcagttgaagtggctagaggcaaccgcagctagtttgaagaagtccatagcagcatacacccatattcacttgtctatggcattcttccacatcccattaccagaatatagaaatctcaagcagccattcattggtgaaaaccgagagggagtgactgctcctagatataattctaatgctagatctgtactaagcgatattggcgtgaaagttgtcagtgttggccatgaccattgcaacgactactgtttacaagacttccagaaaaaggatggagtcaccgagtcgaagatgtggctctgttatggtggaggttcaggagagggtggttacggcggatatggaggatatatcaggagacttagagttttcgacatcgatacccagaacggagaaatcaagacatggaaaagagcggaaaacgaccctgacaaggaaattgaccgccagaccatagttcaaggtggagaggttgtcaactttgcataagaaagatacataaacgcgggagatgtcccataaggtaattcggttaattgatgtacaaacggtgcttggtatagcgtagccaagttctttagtgttagaaggcgttcggaccacgattacaagtaagtagagtatttggagctcgtgttaatgctgttttactagcaatgaattttgcatcttacggacactgcagtcgtggttgcagagtggtaaacttcaggtactttatataatagtctattttatacgtgctaatattatattctttcaaaatgttttgaaaaactatgagatctatttgaaatattctctatcagccaagttgtctaactcctactctgtagatcttatcgtccacaattactggataaagccagctacattctcttaggcaagttggttaacgagcatcgtttacaccaaatttgaacgtatactcgcgcacagtgcagctgcataagtatgtgcatagtgctgtgaaacaaactctaagtcgggcttgtgcataaatattgacctttcccaacttttgtcgatttgctcagaatttaggacaagaagcggttcatttacttcccttagcagcttgtcgtttctaccttgtgtacttaaaactgactttagtaggacaaatcgtcccctttcactcctttgcttttcgactttgttatatcctttgacccagcgactccggttttattacttgatttagttttggtttttatttgtacactatggcattatgactgagtccaatgacccctacatattgaacgagaccgctgctcttgccacaacacgagcccaactagacagctcccgtgagctcaaacagtggcttgccaaatcaaactgcaaccaccactactctaagtttattgaaaatggcatatcgtttgatctcgtaccagaattggactcgaacgcacttcgcgaattgggaatcaccaagttgggagacagactccgtttggaactcgctatcaacaacttaaaggctgccaaactagccaattctatcagcgttgaagaactctacaaagtaatgaacctacagataaaccagacgattcccgaatcggcaattcttagaaacaacgaatcggctactaacggggacgctaatgtctcaatggaactgatgactctaactcatcagacagagagcactaccagctcaactagcagtgtagcggcagcaaacaataatcagctgacccgagactctaccaagacagccaccttcatcttccaggatggggctaccaagcgagtaaatgtgacgggatgcttcaatgcccagtccataaagagaaaggttctcaaaaaaatgggcataaagctgctagaaacggaatacgacacatatatccactcatcaagtgccaacagcggcaacagcaataataatactaataattttaattataatggaagcaatatcgatgcgaatgagagcccatccttgaatcttctttttgatgtcgaattggttaccatctgctactcgcccgaacggttggaaaagcacagaataatactttgtcccaaaaatgagtaccccacagatgtggctatcgaagtgtccaagcgtatattggcaaaatacgaacgttactctaacaataaactcttgagtctagaaaatttaagccaataccacatcccagaaagacgaaaggatgccaataagaggcctacgttacgaaatttttttggccaaagaccccctagtgaattgatatcgtccaatttggccgagtatttccctgatacccaccagagggacttggaagctacggttcgcaactcggtgcgttacagtgttcgtttatcgcgccgttttaatattccttctggtatgggtgctgggggtagtagtggtagtaccatgtctattaacaataccagacagtctattgtcagttccaacaccatttcaactcatttggctccttctatattgtccaacgaagtacctagacgaatgtcagcaagaaccattggcgcagtcatggtcaataacatcacggctatagatgaagctgtaaactacagcaatgcggatgcgcagtccatctttagcaagcctccatctgtatattctagtaccagtggaacacaagattcaaagtctattatatcatcgaactctaatggcagatactatggccccaattcacatcacagaatttccattgctacaagtttttcggaatctggtgctaacaataaccggtactctcgtattgaattagtgagtgtagactccgactctgatgatcaggacgacattatttctgagtacaacgacgaagacacattcaacagtttggggcacatctcggaagacggacccaagcactggttgaaaggtgccagaatcggtgcaggtagctttggcagtgtatacctcggaatgaatccattttctggagagttaatggctgtaaagcagattcctttgccctctaaaaacaacgcagaggaagcgaagaagttgatgctggagcagcagcacgagttgacacttctcaagctgttgaaccatgagaatatcgtgcgatactacggggcctctaccgatgacgaatatttaaacatctttttagagtacgttcctggtggctcagtccagacaatgttgcagtcatatggtccgtttgaagaaccattgattagaaacttcatcaggcaggtgttgattggactcagctacttacatggagaagacattatacacagagatatcaagggtgcaaacattttgatagacattaaaggtactgttaagattggagattttggtatttccaaaaaggttagtagtttggaagaggacgaatcccacagttctgctaagaaggacggcagaagggcttctcttcagggttctgtctactggatggccccagaagttgtcaagcaaactgcatacacaaagaaagctgacatctggtctgtcggatgccttattgtggagatgtttacggggaagcatccatttccggaatttagtcagatgcaagctattttcaagatcggaacccatactactccgctgattcctgaatggtgtacaatggaagcaaaggatttccttgataaggcgtttgagcttgactacaataaccgtcctgatgctatccagcttcttagtaatctgttcttgaatccgttaatcatgtccaagagatagttcgaaactgatctacgtgttagttctcttgatcacatcattcctaattgggattatgaattgatcccttttaaatattatgtaacttgttatgttcattcatccggaaacagtaaccaacaatttggtcccagcaaggaatttgtcaagcagaaagtaccagagcttcgtttaccaaatatagtagtccctgttagactagtaatatgaataagaagttgcgagatgattactttacatggtcgttgtaaaagatgtagttgtagaagtaagttaagaagagcgagatcatcgatgtactgaatctcccggttgtaattgccaactgcaagataataaatattgtatattgaacaaattattagtcttaaggatctaggcttggcgatactacggagtcttttacgatatctgagggagacgaagctcaacaatgaatatacgagatctagtgagactagagagctgcaggccattaccgagacgtaagtctcttcccacgatagaaccacggaatatcaaggagtagaatatctacgagctagccaaacgtacggtttacaacaaaagagacaaagagttgatgccgagtacttgaaggtgagttggctaacagtaagcagtccacagcaatatctttaattgcttctgtggcactacaagtacactttgcaatacccattgcacatcacactgagctattcaattgcatgtccagtgtacatctgaatgcccaactatacctggctactgctaatactttgtaagtgaatatgattgaaaatagacacttcagttgcagctttaagttcaataagtgaagtcggccctattgatttgcgcactccgtcatacagaagcgcattttttattggtgccaaacaccgcattacatcatggcggcggctaacaattcaattcggcaattagccgattcgagctaacacactttagagatgccactgaattggagcagggtcgagcagatatattactctgtccaattggtcaatctacaattcagactctccttctatgttgaaattcgttagccaaggaactcttcaaatcttctgatcttccccaccttcaaagcttttgggtcattcacgacctctatacaatttttttgactctcctgagtcaaccatagttaatgaatcctacttatcttcttcaatccatttttagagcaattcttttcttctcataagggctcgactatatctgttgcccgttggcttatatcggatatctgcctcttgaaagtctccaatcgagaaactgcagctgccgataactaccaaccttctccacttattttaattataaagagcaacatctccacacaaaaatatttctacctacgaggtcgtgaattagactatacgaagataagtcggtattattagtctagtttgaataaggctagaacccatacttgtcaattgtctaatcatcaccaaatcgtctagtcaaacttctaaaaggacttcattccatcggatcatctcattcgcatcattcattttagcaaatggagattcctctcaaatcacaacccaaagtctcaaccgccaatttcactgccgactcggcatttcctgttgacccgttggcaagaactactccaactccaggtgcagaaagtgatgcttcttctcagttgaactcagaattgctcaaagtcagacgcagcaataatccactgaacaatagtaaaaatgattctactgatctcacaccacttaattccactgctcagctcaagagctacaagcttagtagacgttattcggaaactgagaagaataactttgatctggaaacaggacatcgtctctacgatgatggtaaaatcagaccccaagttctcagaaacgattcatacagacaagatgtgtacgatctcagtcgcaacaatacctacggcactctcatgctggagaatgaccctagccgaagtaggactcagagtccagccaagatttattccagatctcatgacgagtatatggatggaagtagcgagggagtattaggactagaagacgagtacattcctggtttgaactttgccgatttgatataccgttggaacaagaatatttctgatcagaatcttgtggacatcaacgagtcgagaggtcagctatatgatctcaaacaacaaacttctaacacttcttctacaaccagtatgactaatacacctctgagtagagacgcctcttacttggatttgaatcaattgcatgcccaagtggccccacaacccatcagattacgaaaccagacttcttccaacatgtattcgttttccaaattgcacgattttatgaaactcagaccacattcaaaaggcgacgagcggcccagtcgtgagcccaacctcagcactgtaacactaacatcttcagatgataccactagtaatgtagataacgatacagatcataagaacaagaaacaaaaatctgtaattaacccagcgacaggagacataaactacgaatggatccttagcagcttaccaccaaattttaatgatttgccatattcccagcgcaagaagttggttagatcattttccgagtcaattgactactcgcagttctcattatttgcaaagaactatttgcaagtgaagccaggtagttctggctcggaaagaacacccagaagtgccggcattggctccaacaacagtagttttgccagaaggcccagaatgaacagtctcaacactgtagcaggtaggttgttggcccggacttctacttcggacttgaagagattgtctgaattaaacaaaccaaaagtaaatgtagacgaaaaaggtgcaattgtcatggaccatgagcttggaaaagtgattggatttggagcttggggaacgattcgtgagtgcacggacagacacggcacggttcgtgcaattaaaattgttaagtcgagttatgattatgatggaactccatctccgcgtagtcaatctccgagcaaagctgacataaatagtttgaagcacctgaaccctaaggtacttgaagtcttcaagaaggaaatcaatatctggaaagaattgcatcatgaaaatatcttgcctcttctcaagcatcttgagacagattacgccatcttctgtattaccaacagaatctatggtggcaccttatttgagttggtgtcatcatggggaatctttaacagtggcattaacagcacttcaggtcctttggagttcctgattgaatctcaacaggagcgattgaagaaggttatactttgtacgaagcagatagtcaaagctttgttgtacatgcacgaggaaaaaggaattgtgcacggagatttgaagttggaaaatgtattggtagaagaggattcggacaagggctacaaaatgattctttgtgactttggcatgtcgaaagcatatacgagtagaatcagcagaaagtcctcggcaagataccttcctaataatatctttgccatggtagacgaagacaccttaatgatgagaagcaaatcctccaacaccaccatgagaaagccataccagggtggagattctgagaatacaaagaacttaaatgtagcaaaggacgattcaagaatagggctttccaatctaatgaagcctcatggcccctcaatgcaatctgtggatcttactccttcacaatcgtcatccagagctaattggaaagaatttgatttcagaaggaagagtaaccacaaggaagacgaaggaatcgactccgatttgcctcatagtcatattggatctcttccttatgcttctccggaattgctttctccctctccgcctccattggggccactggctgatatatgggcgcttggggtcttgatgtacaccatgtgtgtcggcaagcttccattccaacatcagtatgaacccagacttcgtgcgattatctttgcaggaaaatataatagagaggaattgagaaaggcctgccttttagaatggattttcaatgagaaagcagctaaaggtgatgcagacgaagcattaccggctagtttaatgatacaatctccatctttggttgatcttagaagacagcaggaattagtggatttgcaccagacttggttaaaatacaaagactctcacgaatttcaatggctatttgatatcattacaggatgtttggaaaaggatataaccaagagatgggatcttgaaatggtgagccactgtcttgaagttcacactccgacaaaatagacatattatgcaatcgactaagtaatcgcatgtaatataaatagaccaagtgattatttcacttaacaaaaggaaacgacggtaatattaaataaggcatctaatcaacgaaattatacaaaataaatacgtaaactactcattcttcatcttcaacctggataacaattttaccactagccttacctgacttcaatctgtcaaaagcctggtcgaattcactccatttgtaggtgctatcaatccaggtcttgatctttccttcctcggccaactttacaccttcgcccaaccaccagtcgccaccagccaaggtgaataaatggtatttgtagaaactcaaacccaaagcggaaagaaagatcttgaatgcagtggttataattttgacaacaaacttgaaggaaagtgaatggccatcatagtcaccgacaatagttacgtaggtacctcctttgggtggcaatatatgcttgatttgagggaacaattcagtaccaccaaccgtatctgcgatgaaatcaaactcaccagtctctttaaccgattccaaggcagcatttgcaagactttctttgttataatctatagtagagtttacacctaacttggtaacgaaaggctcagatttgctagagcaagtagcaacaatttctttagcacctttaacctttgcgagctggataacatgtctacccaccgaggtgtttcctcccaagactaacaacttcttgtccttcaaatcggcaaaactgcaaatagtatgagcagttccaaacaccaagggcaacgatgcagcttccactaaagagaagttttctgcgacctttgtgatagaattgtcaccttcaattgtagaatcaaccaagatatactcagcaagagtaccctttccaaaagggtggcaatagaagccgtggaccctatcgccgatcttgagacctttttgagcagctgcctctgctccaattgcaactaccacaccagcatagtctctgcctattccttgctgagagttgaagatggaagtaaatctgccagcaaaattataaagcttctcgtcgactggattaagcgagacagtcagaaccttgaccaatatattgtttggtttaacagaataggtgccgttgcctgctggaaccaatttgatagtttgttcggtaatagtgatgggagcaccagaatgggggtaggtgtatgccttgtaatttaaggcctcggatgtaaaagtcattgtaataaatagggggacttagagacagttaagcacaatagtcttcacttgagctgaaaatgagtccaaagaaactgagatgaagagatgtaaataccctaaaatggggttggttttctcgtctttttatttctgaaaattattatcgcagccacggccgtacagttattatttcgcagtgaagaatgtaaaatctaaaaaaataatattgcgctatgaaccactctatagccgtagccaaatcacaagatcatcttagaagccagtagaagcacatcggattccagaggagttacaaagtgcagataaggatttatcttgccactgtccccgcaatcaagtcagaggaggatcgggcggctactgagaaccatccctaacatccgctacagtgcgaaataccccatggactagaagttcgagattgtggccttgaggctggagtactgcggcatggatgctatccaaatttggtattctcgtcttgattacagtgttccaagtcaggatgttcgtagtggtttctattagcgagctgttcaatttaagccaagttaagataaactttagaagtgtccttaacgaagagcatatcggaaatttctcattctgatttctcgtatctggcaaaaaatttcaccagtatacattcacttgatttacatttcgaaccaatcgataactgaaaagtaatccaacaattgctggggtttcaacttcaaatagcgagtcagcttccgtatccagtcttgtatatacatagttcaattcatcaatggtagtaactttgccggaaggctacagctttcgtgctctcgagcttctggactacgccaaatatatagaaaccttgaaggtgttgaccacagtgggagaaatttctctggaatcatttgctgaacttttcaaccattggaaggaacatcctcatatttaccagcctcatgtcatagccaataccgagggtttagtcgtggccacaggaatgttgttggtagaaagaaaattgatccatgaatgtggaaaagtaggtcacattgaagatatctcggttgcaggctctgaacaaggcaagaaattgggtttgtccatgatcaccggcttgactgaattggccgaaaaacaaggttgctacaaggtcatcttggactgttctccacacaacgttggtttctacgaaaagtgtggctacgcaaacagtggtgtagagatggtcaagagattctcttgacaaagtcatcaataaaatgatttatagttatttattcaattatacatattatacaatgtcaaatagaaccatatagattctagatcttctcgagagcctaaatgtagtgttagtatgaatacatcatttctgatatcatttgagtcatatacgtacctccaacgacactatcgagtttcctctcacgacctaaagttgttagtagtctgcaagaaattctttcatgaatatctttctaaatacatacaattgttcctatgctgactttttcaccgttctgtaactcttcaagagcgtctgctaatgtcacattcaagaacacctacagcatgttagtattggcatttgggcttctaatacgattctgttgtgaaaaccaaatcttaaaacatcaactatacgtacatcgtatcctcgcaatgtgccagtcacttttcttgtaccatttagctgtatcagcaacttcttatccatatactatagtaggttagtaagagttaagtaaaatcgtttggaactagacaacgcaaaaacttccaagaaagcaacatacacttttcaattcaggagcagacaccattgtgaccactattatgctattttaaattagatatgcttgctctagagtgaaactagtaatggatcttcttaactaagaagaaatagacatcgcgatattcgcactcaaagtgaaaatcgcgcttaattctactgttgatatttcagatcaaaaaaacaaccagaatcatatacattccagctttctaagattacatcctagccttcttttcttcgcagcaaaatataaagaaatgtttatataaaagatatacctatcataatgagtaacatacgcgatatcacgtcgctttcagacttgttggccacgtctccaagccaaccactacatgaaccatccagcaataagagcccagcatccactttaaatcttgcagcactgatattagtgaagaagacagcagaagactcaactctgaacaatgatgcggaagaagagcttgacgaaagcgaaataggagatcgtactatagtaagcgattcaacagaaacaccacaaaaagataaagtactagcagaatcacagtcccaatcgatatctcgaaatactacagaaagtcaacttccacaacaattgaccccagaaattgttaatactgataacatagagactctggaacaaagcacaagcgttgaattaagcaacgtagaaattttactcctgaaacaaagtgaaaagatatctctacaagatgaactcaaggacaaggtgcgacagtgttcagatttaaaggccactgtggaagatttgagagcaagaataaagtacttgaaagaacagaaacgtagaaaggacaacaagcgcactttggaattgttgttggaagagaacaataatgactacaacgaaggacgagttcatcaggatgaaactcagactatgttgaatgaagaagatgacgaagattacattctcaaaaacttgaatgtgctcccttctaatgactggggtgaaagattggaccagatccgaagatttgttccataccttgaacttgacaatataggcacatctaacttctatagtaccagcaacgaattgcagagagtcatacagtttgtcttattgtctccattattattcaagattccattcaagctagtcattaacgctagagatgagaccttgactgaaatcattcttcaagattcaagtgcgtcaataatagaatctctgcctctaactactttaagcatgttgtcaacctcgcttaaacatacaattgtcagaaactatatacccaagaaaaagatcaacttaatagtgtttggtcttagctcgctctctatgttgatacacagaagaatatcgaccttctacaatcttatgcgtaccttctcgtcgatattacgagataggaagaagttttcttcattattactggaacaagaattgcaggataacatccaattgtttgccatgttgaagtcgattgacaatctagagtttctagtagagaagaacaacattcattacgttctaaggttgacatggcaagtcaaactacagaacaaaatcactgcagaatgtgctactgatttgcgtttgcatgtttttgttatcgatgatgctcacgacgacgaattagttaagagtgcagatgcattattcacaaaattgattaatgaatacggggtcatcaattcattcaagatagtcttggagaataccttcaatatcacagtagatgaaaaaacagattaaaattaagtttgtttttatgcattgtcactatttaagtgtagctctatacatagttttgatagaaaagatctctttctagagtcaatagatgttgttagaatgaaaagttaacgttctcattttcaaaatcaaacgaaatagcatctagttcaccttgcctcgtatggtagaactgattgctcaaacgttcgatgaaccattcgttacagaacgtagtcaactgcaaaatgaagattgttttctcgttggctctgtcgaaatcgtgaaggggcaagtactcgaacttattatcgtccttcttagtcactgcagttgagtcattggcacctgcatgagcatttggttgttcagcttcatcatcagcttctttggcaagttcattagccttgagggattccccaaacttctggtacaagtagctttcaagtccattgatcaaatcgtaacgaatatcttcccattccattccaagcaatttattcccaatggactttttgtatcggaaatatctatagagccagttacccaaaatggtagtcttcttgttgaaggaagcagtgctggctttggaagatgtacgcacttgtcgcaccactggtctcgacagctctacgatgtgatggtatgtatctacagctacgtgatcatcgggatgagatggtactcttggagactggcaatattccttgatcaattcgtccacatcgtcaattggaaattgaagcacttcgatattggactttaatttgctgttctgatgtttcaagaaatcaccagttccgaccgtttcgtcactgtcatcctttttcagcttctcaacggagaatgtaattacattctttgccaatggtgagggtactaacgtttgatgtaatgccaagtttctttttcctctctttctcttagttgcattttcatcattatatggtctttttcttgtactttcgccgttttctgttttcaactcatggtcttcattttcgttatcatcagtaaatgactcgtcctcattttccaacttcttagccttgtttcctcttttaggtgaattgttgtgttcttcatcattgagatatctaattctggtctgtaacatcttttcagagtattctatttcgaactctgtgtctttatcgaacttggccaattcatcttcaggaataagttccacaggaggaatagtctttccaccgaatgggttcttttcaagctgttctggcgtaaagtctgtctccaaataggtgtataacaaccaaagcatccgtttggccctgttagcagggtgtatttttgaattcaaaaagaactcagaaaaattattggacgcagcgtctgcctcgaacatgggaattccatgggcatagttgctgagcaagaagatgatctggatgatgttggtgttgggcttctctgctgctggatgttccaatatttcgtctaggtctttgggtatattctcatcttcacaaacagctttcaatatagatttcaatctaggagtatcctgaagaggcttggaaccaccaaattgagggtcagcttgtaaggaaggaatagaatggtatgttctcaaggtagatctcatttctggaacaaagttgatggtagtattcatacggcctgcgttgacaagtaaacaaaccttgctgacggattttcccagttccttatatctgatcattctttctttcaagactttggagcatttactggactccactaaagtacgaatatagagatcagaaaacgggattttggcatcattgttggcgttggtgacttcacaaaacggaaagttgttggtgaagcaagcagtttcgtcatcaaagagtgcctttaaaaagtcgtattggatatcctttctccagaaaggctcaccatcagacttttttaaatgtctacattttggtacagttgagtttgtgtactttctcttttttcttttaccggaagctttggtctcatctccattactcgtggcagtagttccattggacactgaagtggtcatggaagcgcctgcagtcgatgtgttcacatctgtttcgtaatcttcttcttcttcttctgtttgatttgcattaatcaagttggaaatggagctagtcttcacaggaggttcttcgtctaccaaggtcgatatggaaaaaggtttggaagtcgctggagttgttgaaagtgacacattactgcttatagggagaggaggaggaggattagactcgccagaggtaatatcagcaatggtaataggagcttttacaacaactggagccgagtcggtactattgacgtgaagaggcattgcagatgatcgtatgctagacgagctagaaccattgacaggttctggcacaactggcttggctggagtataagtatcgtggataggatcgtaactcatagtacaatacggtgtctcaagatagtaatgatattaatttgatgtaatgatcatacagtaattttgcaatagaagtattatgctggagcctaacaattgtttctaaactttatagttgctcagttttttgttgtactcaattgttgtgatttattgaaatgctggacgtgaactgaaaaattcgacaatacaaatgcagctagtggatcaggatctggtgcgagatcttgctgatgtactttctggttagcgatagaaaaatggaagatagaagtcgtctccaattcagttggtcaatgtcagtgtggtccggacttacggacaatgcttaattcaactctgggcagatctcgtggaatgaaaattatggcactgcgaactttgatatgctgtagcaatgttgtagcaatgtatggcgatactggaagtatatggcagtaaggctctatatggctatagttagtgtggagtacttgactgtcagttgtagtttacaagtaattgtgatgcaaaaagaaaagttgtcctattttcactacggcaatttttccatgctgacaataaatgcgtgtcgtgaaatggttggtgacagacccgtttgttgcactggttgagcatttcttggatcggcaggtggtggtggtgaaaaattgcgacaccgcgacatcgggcagacaattagatagagttgatatcatgggcaaaatgcacatgaatacgtttgaatgatatggtcaagacgtattctttagtttgtatacatctgtatgtgaatagaagcttatataaatagtttaactgttcttgttaaaaaaatcagtaaattctgttgatgcaacgtagcagtaatggctgcgaaaatgcactcttgatttgtttctctgctagtttttctatactacaaatacttctagttgcccacctattgtctatttacagtctatactaatcgtaccaaaccattaaattctcaacgacgttgccctgaagaaccacccttccgtcactagtcacatcgataacagattgctttcctggtcccggtctatgtggctcaaacggaagggtccatattatcatccccggtttcacctggagtccgttgatctttgtaattcgtaaaactacaccaatgtcttttccaataaagcctttcgtatcctttgaagaactgccgtctgacgtcaagcatataccattctcattgtaatcatcctgtctcatgttctgaatatactcttgtgtgatcaaaacattcctggtatcgacctgaccagctctcaacttctctatgcatacacgtaatgcattcaactctggaacccaaagatcaccatctataatgattaaatcctttttatctgttttcttgctatcgtagtacaactctgaaacttccatctcatttatttcagtgatattgcccataaatagatcaaaaacttcagtgtcgtgtggtctagagcattgcaagaagagagaatcgtcactttgttttccatacattgtgaatttgtcaaaaaacggttttgttaattccacgtaacttccatccaacgacgtagaggaaagataacttggtttcataagtgagtctttaaatgtgaaatctggcgagaacaagttatctaatgcgtagtagccagatttcaaaaacgttttgtcgccagaacatttattgaatgggtttgtttcacactgctcgaatctgtcaaagaaagggtctttctttcggaggttatctacctttggaatcccgttgtcaggcaccagaggcaacgtgatatttctgaagtaaactgcttcattgctgtttatcaacctttcttcactctttatcatggacaagaatctcttatacaagggatttctaaagttgtagacttcatcagcatccttgctcgagttcatgtaggagggagtcaacttatggttataccataacgggtgagcttcagtggagaacacccagttcttgttggacatcaaattagtgtgcaacaacagctcgtccttcgaatcaaacaataagtaaagatatttgagtgtctcgccgatgacgaaagactccattcggttctggagttctcctgtcctgacatcctggtacccattgaagccacacttggtcttaaacttagtcttgagcaaattaagaaccctctcaccaatttgtagatacattgggtccctagtggctctgaacaagtagtatgtagattctatgaactctggcctcaatggataccattccaaaactattgagtcctcagaagtcaaagtttctcctttggtataatggctatatacccatctttcaggaatcagctcaaaatggtcccatatctttaggtacatcaagtgggattttattgcatcatttaattgtcctgtaagcacctggagaccagtccagaatgcccctaacaggtctatccagttgctctgtgatacaccgtcatttgttcctacgttgctgaaaatcatcgagccctcaaaagagcctccaccacgcgccagatgagtaagaagagccttgtacgaggttttgaatacagaccacataaagttgtcgttgaatataatcgatgctttggcagaatactcgtagaatgagtctatagaagctcctatccccgtcaaagaatccttccaggtatttgctatagggtctatggtcataggcaacaaattcaacggcagcttggaagcccacaacttccagaacgtaagttgagtgtaatgttcgaactgaggatcccccgtcaacttcgacaaaagcgtgaattccatcacgggagttgtggctcctgaagtacaggcatctctttgcaaagaagtgggcacttttagaactcctttggccaaattgattctgggcacaggtatacgagtggacgtcttataggctggtattagacgtaatccaagatcataggctaattccaataaaaatccgtcatatgcagcagagatagcctgtaatcttctgtatcttgccggtactactccactattagttacatctgtgaggagcaaatgagcagagagcaagcctcccaaagatctgatagaaaactcaaatacttgtactattgtatcctgattgaatatatctctgttgttgtagaggtactcgagcatctgctccaattggtcccactcttccataattataagagtgtccaaattgtctaatactgtcagagaagtgttacccaaagcgtcgtttctcgcagtattggtgttgtcttcatagtcaggaccatacggctcacaggtaattggccgtacttcatcagcaggaaacccatatttcatatacgagctccaggcatgcagaaagagatcgtgagcctcgttcttgagatactcaatatgatctggagtgaacgaagagttgaatatattagaatcagttccaagggcttttcccacgaacaaagttatgaacaccaatacataactgctgtggacaagtcggaagatcattgaaagtcgtacctgcaagtcttgttattatgattctggggtatatctgttctttcttctttggttaagctatctgaagatatttattcaaagtcatgtgattcggaatctagttgacatatttttgttctgcgcaatccagtagctgcgaaatccataactagcatagacaattacaattatagatgatattctaatatgcaatgtttacatgcttatttaaataaataaatctaattatatgctaaataagaacagaactgctttccgttatttatgctgtgaagttctaattgactacttcccaaagattctgttcacttgggttacaaccctgcctgttccaaaccacaacgtcacgacgataacgaaaatgtttatggttatgatcaacaatccgctcaacatgaatctgggtgcaaagattttccacaccattaagtgtcttctaaaatgagctgcaaatattaagctggacaccccagtgaacaactggtatgtaataagagtggttacattggttacgatttgcgacaagatggtaataggcttgcttgaaggagccaatctccacaacgtgatcaaaggcaccgacaagcaaataatcaagaaaggaccaaatgtattcaacacaatattcaagtgggtgaatgggaaggttatggtttctgtggtcatgaagcccacatcccattgaatagcagcaagagtagcttgatgccccgtactgaagaagtgctggtaacccaacaatccaaagatcaatggcgaaatcaagtttctacgtatgtccattatgtggtatagctccaacaacgacaagatttgtacgatcaacatattgatggaaatggctcccaatggtttggataccaacatgatggctactgtaaagttgagaaccaacaaaaaatatgatgacccgtaaacgttgccatatcctaaaattgtggctgtcttcagtggcccgtctgaatcttcagattctgctgagtcttcttgtacggcatccgagagctctaacttgacacacaaaggacccttggaccaactaaaatttgcaagcaccaaggtaatgaacaagacgattcttgcaattgccaacttcaaggatttgatcaaaggcgagctcaagacaaaactcgtcgataagaaatactcgctgttcagaacatattctaaggtccaataaacagcattcatgaacattagaaacttgaggccagtaccaacccacaaaggagcagctgaatggtatgaatcagacaacttatagaatgacttgatgattgttggaagaaggtaagagcacaagtgcaataacacaatggaccaccaagacgtagtgaaggtagcctggcagtaaggtctttgttcttcacgacaaagattaatagtggataccaaccttgttaacagggtaaatgtgatggcatgcagaagtcctaaaatcttttgtgaacgcggaagctcgaaattgatagcaatgttaaaaatacaagcaacaccaaaagtcatcaagaaaaacagaaccattttatcttcccataccacgtatgagttggatgcaaaaatcaagcaatgtgccacgacatagaccaaccctaaaaaggaccaactgttgaaattgtacacgaagaaatcgatgagctggtgcactagccagttgatgctgaatctatccattatgggggcccagaatccgacaattattcccaaagaagcaccgagggctaagcattttttcaagttgaaatcagcaggctttaataccaaactcactgaaagacttagcactaaaccaagcaatgacatggctatcactgatccaatgaactcgaaagacatcgtcagaactctgaccgcaggaatcgatctagcataggttaggataaaagtcaatgctagcaaaaggattgttattccaacgccaatcatcttcaaatcaaacgtcgcccataatcctttgcattcttctaaagaacgggactggtatgtcttggccagatctaccaaggtgtacaagtcatgagaattgttagtataattactgatgatctggtggtattgtttgttgatttcgggcgacaaatttggcgtactgtttctgaatccctgtatctgttgtagagttttatacgacgctacggacaattccatttggttttcaaatgcctcatcgatggggaaaccaaggttgttgaacggtattggtagcccaagcaataacgacatggtggagaccaagtcaatctggttgacagctctataatgcttaccttgctctgtagtgttgtaatgacttgaatcctttttaaaaaacttattgtttttggcatacatgaacaaggtgctctccaactcatccggcgaatcgcctccgtggttaccggtggaatccattccatgatcacctatcactaccaataatgtcttgtcgtctaaacttttgactacattggctataacctcgttcatctggtttaacttctccttcatcagaaagtgacggggcccatacctgtgccctacatgatctactccgagaaaatggcccactagaaggtcccactggctcgaattatccttgtgaagcaatgggtacaagtgctctatgactccgttatcaacagtgtgtaagtcccagacatttaaggagtcgtaaggaaagttcaacgcaggattgatgtagtggttgaacaaggcataccaggtgtcatcacccataaatgcaatgcttttgttgttcttgtggagctggagcaaccagttatcttcatcgatggcatccccgtcaaagttggaaccggcgtcgatgaaagttggcaacgaacctgtggttaatcccttcaagcgttgcaaggtcgttgtgggagggtcggcaatgaacttgagcaatacaccatgatcatcctgagccaattgatgtagtatagggaagttgttgtgatagtattcatttgagtcggctataggaatagcgaaatcaaaccttaacgcatctatcaccaacaagatcgccttatcgaaccgggctggcgccatgcacgtattgaagtcattagtggtacactcggatacattgggtaagacgttacgcagaagtaagaagccctttgtgaaaaaccctactcctatgaactgaactagagctagaaatactagcaccacaagatagcctataaaggtgacttttaacttctgctgtcggatctttgatcgcagctgttgctggaattgctgttgtttgattgctcgccggttggtcgctgaagtgtcgatatcaactgactccattctatatttgtatggttttactgtatgatctgaaatgtgagaatgaaaatgtctgaaatgttagatagaattgtttaatattgttattagagcgttgatctgagataatatttctatagtattgataagactgatattggtatgaaactgctttaattaatcctttttctatgatctctacttcacgttgttccgtgatttgatgattcactgattgcgagttaggttagtgtttgaatatttctttgcagaagtggttttgtatgaaatatatcagccgcttgtgctgaacgtttgctaaaccacgcttggatccgctagtgggtttgcaagctgatggcagaggagaattgagcccggtcttcctatcgaagatattctgtcaaaacagcgtgaatgcgcgtacatatcaggacttggccgaagcacgtgatgggttgctcaacgatgctactaattattctagaacctttgcaaccatttgcatcgaattagttcactatttcagtggtaatcaagctaatgtgtgtaaactaaactaatgtgttacaaaatcttattgttggttattgttcgaatttgaaatagctggaaattactttggctactactttcttttcctctacttatatacttcataataatacactacaactctataacctctcctactccatgctatggtcgatttgactcaagaagtcctggtcaaacgcagagcctcccattaatccatcgtctccgtcctcttcaaaattaatcaagcctcccatatcgtcatttacaatagccaggttgggatctagatctccatcattgtcctgaaggaaagcattcatatcgtcatcaaccatatcatcattctgatcgttacccataccagctccactatgtatggaatctgcaccactttgaatatcagccacagaattgatattcgatcctctattattactgtcaattacaccttcactactattgttagtgccattgtctatgctgtcgatattcaccatcgccatcgtgaagccactggccatgttgccattgttctcgtagtcgttattactgctaccattttcaaactggttcaagtacatattcccattgaagtttcccgtgtccaaagcaccttgtggtcctaggttggctacagattccccgatggacccaaccatcaattctgacccaccaccgttcaatcccgacccgttagtaggaacttgtgctttgatgctagcagcaataacatcaattccagtgcccgcactgttggcagtaccgctattgatgttgatgaaagatgtaatcagcttggggttgtagttgggtggtgcatgtgtgacttggatcaggcgatctatactggttacaggcacagagtagttcttcacagctggtacggagtgcaacgtctgattaaactgctctttgtattccagcagcaacttgtccacttcgttctccaagtcctggagtgactcctggttgtacatcttggattgcaactcagacaacttgtcaacagcgttagaatggaagttatacttggaatcattaggaacgtatttggcataatagacattggtgtcctgtttcaagtcgagaatttctctctgtaattgtttctgtttcaacttcatcatttgcaagtctccaaaaacaatatcttctggtttcaagtcggcaatgtccagcacgtcacgcttaggaagttgtgggtataaccgaggaggaattattttagaggtatggaccattttcgaggtggcattctcaatatactcgtggttggtgatgtatctgttgagggcatcagctcggaacgatatcaagtcggcttcatcatgtagttgaactcctggttcttcctttatcctactttgagccgcagcatgagcctgggctgctgcttgagaacgagctgctgcttgagcctgggcctgggccgcagcctgtgcttgtgccgtggcttgagcttgctgcgttttcttgttcatgcggcccctgggtcttcctgggtgtgccattgtgtagatgtagatatgttattagggacgttgaaataggaatttcaatttatagtacaagttgaacgagttcaatacgaagggtctttaaagtcttggttcagacaatttgtttatgttggtactgctactatatgtgatcttatattattcaataagaagccagctttgctgaagtattggacataaaacaaacgtaggtatatgttaaagtcaaacatagagttcagtagttatgaactggagatgtggagcgcacgacttcgcgcacattattagaattttctcatagttaagctctcatagttaagaatctgcagaacagttagccatattttaaatatggtattacgtagttactatttgttagtagctgctcaaacctagttatatcgatttccatagtaagttacataaaccaatgggctgctccatagtatatctaccactctgcactttctttatcgaatgtataattactgaaatatataagaaaatgtaactaaataaatataacaacgtaacagctaacaatattactactactccacgaacaagcagaaaaagctctctaaccatcaatctacaagtcgaatctaccgttaacgaactcgtcgtccatttgatggtcctcgtctatctccatctcgtcaacttcgtcgatctgatcgtcgtcgatgacgtcttcatcaggaggtaagttggggtttcctggaatgaacgagcccgagttcttgaacgtgttcattctgtacgacttaccaaaatgatcttccatggtcgagtcgtccacatacgtaaagcccttgaagtttgcctggattcctggtgacaatggcgtggatgccaactccatctgcttcttcaacaccgacgtcgactcggaggtaaactcaggatcaaagttggaagtatctgtctcagaagtcaaatgaggcttgaaaggtggggggatgcttttggctcgcaacaactcccagtcgatgtcgttgaagaaagcatgtgctctcaactctctggcatcgttaatggctcccaatctgtgcttggggtttctgttcaataagcctttgacaaaggatcttccttcaggactcaagatctccttggggaatctaactttgccaaatgcaatgttcttgtacatctgttgagtgttgtcagcatagaaaggagaccagccacagcacatctcaaaaatcaaaactcccaacgaccagaagtcaaccatcttggtgtatccagattcgtctaacaacacttctggtgccaagtactctgtggtgccacagaatgtattggtggttccgtcgttgtttaagttagccttcgataacccaaagtcacacaaagctatatgtccattggcatccaacaagatattttctggcttcaagtctcggtacacaatatcgttgtcgtgaagatgttcaagagccaagaccaactcggcgatatagaattttgctctatcttcagtaaatcttccttccttctgcaaatgccagaacaactctcctcccgacatgtagtctgtaaccaaatataagtcagtaggagtttgaaaggaaaacttcaatcctacaatgaacggagaagcggctgcagaagttctcaccaagatgtttctctcgccaattgtatgggcaatttctttctttttgacaatcactttctttgataacaccttcatggcgtagatgcgttcggtgtccttcttcttgacctggaaaacctggccaaaagtacctttacctaacaatcttaagacatcaaagtcttcagggccgtacagcttcttgttatcaagagaagtgtattcccatttgatcttgatagacccactgacacgctcaccgacgattctgggtttcaactgcaaccattccgtgctgttcttcttgtttatgatggtagaaggaaaaacacggacatggcccaagaatgcgtcgtcgcgcgccgagtcgtacaccgagatgtctagctctgatttggagccgacaacgtcgaagatggcatcgtggttccagatcggattggaagagtctgagatggtggctacttgttgcgtagaagattgtctcgaatagagaccaggtctgttgctggatgacagggtgtttctcattggcaatgctcttccgcccagatgaggattaggggccttgttctggatgctgggagacttaccaaaagatccaggagcatttgtcacaaactccgagctttcaaatgtacacactacatacggttgcgatgcagtgatatctttagcttcatagattgtgatcttgagctttcccttgggctggctgttcttgttgttcgaacgtactgtctggcccgtttcatcggtcgtaataatcatgggctggccctgagtgaaagcctgtaccggttcctcggtcagcgaaggttgattaggtaattgttgttggtcgtattgtgattggttaaattgagtttgttgaccaaattgctcctgctgttgttgatttagttgctgttgctgctggttaagttgagattgttgttgttgagtcaacgactgctgggagtagaactgtcccagtaactcgtttgacttgaatgtctgatttatgtaagttccagaccccgacgatgtcgagcttgttgtgccgtacacgagcgaatggctggacactgcagtcgtaggtgctacgtgggccaagcctttgggaagaaacttgtttgtatggtcatcggctagctggtgagcaacagcgggagtgtgagcagtcagcacggggttgtcaatgtgatgctgagtgtcagccggagccgatccgggagctggtgagttatcttttctgtggaagccactaaagccaaagatggacttggcaaagtcggccatgatgaataattgatgattaatgtatgaagatggtggcgtctaaaaattactatagaacactgttgtatatctgatgcaaggcagttaacagcagccaatagtgacaatgatagggataaatagctatggtgaaaaatattgtgaatggcaatagggtagtagatgaacgtctatctttcgcacaactacaatgggatgcaatacggaaacggccgagtgatctctgaaaatcgggctatacggcaatagcaatatgatatgacggtattatatctggtatagatatctgacagtgtctataaagatggtggcaatctataataggcagtatggctcacaatttctatatcagcagatggaagttcctcgctgtttgattattcttggttctggctctagataaaacagaagatgagttcgagagctgcaccagaaggcagtggggatagtggggaagagtgttacgcgggaatgggatgggtcacactggcaggaatagccgcacagtggagggtttgctgatgctgtggtagaagtaatgctagcttagtaaagaagcaacaattatggtcaatctcagactcaaatctgatgaggatgggtggatgctggttcctgtacacagtgcgtgcgtttttttctggttgagatagcggaactgaattgaagatgggacaaatctgtagatacagattgtcctgtgcttagaattggcgatagagctagaagctacgagtcggtcaaacagctggtcaagtctatacgaccgtattgtgcaaataattgtgtacatttatatactggcgaattcaccttcagatttttgcatttggagggagaatccaggcgaaagctgtgattccgtcgacatatctatacatttttctttcttattcctgcccctcttgtcttgtgtgtaattcgttcctggcctcgtagataacatccagaagtcgtcacgtgcgtatctcgctgcctccaatccttgacgatagccacgatttttcgcctgtgtttggctccggcatctgcggcacggatctacccacctcaaggctagacgacctgggcttctgtctacgctatgctgattttggccctcgagccattggctggctgttggcttctgaggcatattctgtcacaaaacgagtgcaattccatcgcccgcctctgtgcagactcctctctgccaatcacattgtttgaccgtttgttactctcgctaactgaacccatgcaccaccttcctattcgctgcagaccgttgggtcacgtgagtttaacaaaccgttcatccacggctggaacttctagacctcccagaagcaatacggcagtttgggggttgcagttgcaggaggaagcggagcagcatcttgtgtccggaacttgacttcattcgtgaggtgtttgcctttttgtacgcttcattgtagtccatgttaacattgttttctaagttgaaatagcaaatggaaaacagatacacgagcgaaaactgcctcttattctttgaagttgggatgaattgctacagaaaagttttaatttataatttctacttaagtgctatttctaccaataaagtgttatggttttgtcagaatatatgccaaacagagctatatattcttggaaaatcgttactacttcagcataccacaaaccttcattcttgtagatctagtctctcatagccaagtaacaggcttttctatcttggccgcctatcgctaactgcaatatgtacaagctgcgtattctctttgctgatatagctgcgaaaacgatttcgcagtcaattctgacagactttagtagaactgaaacacaaatagtaccgaatttttcattaatttcagaaccaaatgtctttacggcatctaaacggtttcaacatacccagcaacatgtatcatcttccctttctatgcgacagaaccacttcccttcatactcccatctgctacctactcttccatgtctctgcatgtagtgcctccaatcagagtgtggcctgcacattctccatttcaaaattttcaacatattcactgttaaatcaacacctagagccaaccaatactgacccaacaatactgcagccataatgaacgttttgggtacatcttggttcagacagttgtcggccatcagccccagatctggtgtgtccatcatgaggactttcagtactactttgccagtgcaggctcgcaacaaaaatgacaaattctacaagatcttgaaatacgtcaagcctatagacaccactgtgtacgaagctggccaggagcttccggaaggagtgaagatacctactactagacctcaattcccccaatacaggtatgaggccatgtttttcaagaggcaaaatagaggtttgtttggtggtgtacagcgtaagagatccaagacctgttccgagagtggaaacaagggtttgagagtacacttgcctaacatccagaagaccaaattgtggtcagaaacattgcaaaagtccatccccataaaagtcagcactaaggtgttgaaaacaatcaccaaagagggaggtttggataactacttaaccaagaacaagccatccagagaaaagaccttgggcttgaaaggatggcagttgagataccaagtgttgaaacaacgcgaactcaacgaattgcctgctatcaaggatgaggaggacaagatccgacaagtattttacatccatgaagacggcaagagatttgtagtgggcaagaataagttgttgaaggaattgtatccatttgttagaagggacagctacacccatgtaagtcatgctgactttactagaacccacaactacttaagcattgccgaagtggtcaagaagttggaacaatatcccttcgatttctccaaggtcaccatataacctttgcatcttgtaattaagagccattgtccggataggatccgctggggcatacataacgatactatagctgtacataagaagtaatacaaaacaagtaatacaacaagcagaagtgtacttctaccactggacgtataaagggagagtaattacatggtttgaattcaattatggtatgtggccatgctcttgaagtaagtttgaacccttttcctatatgacacaattgtggtccttgaattttattaagctattcttgtttctgatcatgtccttgtctattcatgtaatgatagatccatatatatatgggatatgtatatctcatagtatcttctatcagaacacttgaaatctcagtctgtgtactttacatttttcatgatcaattccaaactacgagttctattctcgtcccttacgtttaattagcatctaactgaatgttcatttgcatctttcatagggcatatgtgttgcagccagataacggtgttaagtatagatctcatgactcgggtcccgtgcacaattcaccagattagaagtaaaataacagtcacaaatatcacgtgtgccacaatttctctcttggagttgtatatgcaatacaatttattaatcactcacgtgatttaatctaactgtaggctctcattatggctcgcatagtaactttggcatcgtcttctgtgcaaactttccgcacggtacgaaaaattttcgaacaactactctactaaaaaaattgaagttgaagagttttctttctcagtaactaatacttcaataacatcagataaaatggctagaaccggtatgtctagaacgagaacagtgtaacccttgaaccaaatgagaaaagacaaatgatatgaataagaaagtagaaaagtgccaacgcgataatgctcgaatcgtcagaagttcaatatgataaggccaaaccttgaatgcacttaagattaatcccatacaacaagaaaaagaatcaaaacagtaaaatataccagagattactaggacggagtaagaagatatcgaacaatgtgaacatattctattcgaagcgaatccaatcatttttcaggatgacctagtagtatcattaggagtctaataattctgaaaacttttcagtgccagatccatcatattccaagactttcatatcaagatctgaaagaaattgtaaatccaacttgcggagcagaaggcaagatttcaaaatttttacatctattttcgtgtcatgtattttcaaacaatagtcgaggaacacattatcagcttatgtgaataatatactaacgtcgttgtaggaattgctgttggattaaacaagggtcacaagactaccgctaaggaagttgctccaaagatctcttacagaaagggtgctctttccaagagaaccgacttcgtcagaaacatcgtcaaggaagttgctggcttagccccatacgaaagaagattgatcgaattgatcagaaacgccggtgaaaagagagctaagaagttggccaagaagagattgggtacccacaagagagccttgaagaaggttgaagaaatgaacaaggtcattgctgaaaccagaagacactaagttatttagttcatatcgacttcatcaccaataataatacatcaataattaaagatttatgaatttgggcttcttctgtatcatttttatagtgtaaatgtaaaatagcacgtttagacactgatgtagtatggaggtatagaatcttcgtagccatgctgtattaaaggtaacagtaatctatacttgttctaaagtgtgttatatcttcgttgttttcacgaagcgtacctgaagtagttcttcaatttatattaaaagagaaccaaccgttttgtgtctttttttcccccatagttaagactcaaatataccaaaccaatttttcaattcgagatcctcgaatagttcattagtagccataatacctccgtatataattccaatcaaatatgtggcgaataaaaggactcaattacatcctggcccatcggttctgccgtctgctttctactaatcttcctcctccttctcatttctctaatccaggagagatcccgaacacctacaatagcaaaactacactgatagaccaacaccaaacatctccagtttcttcgcaaaatagtcagacgccatctacattacctcctccaacgtccagtgacagaagcagccctcttaaggaaatcactaccttgttagcgatgggcacgttggggtatttggctatagacaattacttgaaccgtgtcaagttagagaaattagccaatgaaactaccgccatcaacctcaaagctctccagatccaacagacaaacttcctaaatgcccgaaaagttcgagatctccaggttcttcaagaaagaagagactatgcaaagagagacttcaaaatgggcttacatatagcaatattacgccaacaattggcagacctcggagttgagccgatagatatcgaaactgccatcaaggagtttgaaaagaacgtcagagctgataattcagtcaaaaacgtcagtggtcaaaccctttggttggtggataattctcgtacgtataactaaactactataatgtacctattactgcggcacgggtactttcactaactcatactaactcaaatccttagctctaaaggcatacatgcccgacccacacgactacgataagaagaaagtcgagggaagctccaagacctgatttagactcatgaatagaccaaattatgtatatatttcaaactgtagtttatagctagataccctaactggttacccggaattgattgtatagttttaacacgtgacatcagttttcaattttcatcatcacctataaaattgcatctcgagcaaaattttattgtgtatttgtcttcttttcttcatacaatgtctttaagataggcgcccattagagtcacggtttatatgaattcctctacatataatctataaccactctgtggttttttcgtgctcgggtaatccttagattaatagttttcaccaaccctgttctgtcgagtcttactggattaatggagagactacgcggttctagacttacagttagtttatgttattgtagttgtagattctatgtacataatgacttcgttgggtaaggctaaaagctatctactcatgagttatagtgatgtagtattgctgttcagagcaaaactatctgaacaagatggtaagtaacagaataaagctgattgcatcgagattctactaccatgatggcacctcttcttatttcaaacggattcctacacaattttggattgttattgttattgtaagatgatgactgcgaaattggctttgtatgtcgttattttatctgtccgagtttcgttgctatactcaacttgacttaacctccagttctatgctcaattaactcagcatcaatattgcctaactctctctgcttcaacttgagctgcaacaacttgaacttgggacaacatactgtggtactttctgccccattcttctcgtaaaattgcttgcaacagagataaagctcgtctataagtttggtgcacctagactcattatagccatttgccagcaaacaatcttgaatagcacaagcttgcggtttacaaggatcgctatttcgaccagacattatacagcttgattctcaactttttatattgctgctttataggtcaggaatcgaaacaaatttgaattcaattcaggaaaagaagttaactctttgctaaatgtaactcccgaattttcacttctcttttgtgccaaaccagatatcaattcttcaatgatgttacaccaactaaccaaataaatgcatgtgcacttcaactctcctattgtgtctgctactaggctttcgctatctatactacgtcttcaatcaaattctggttcgtcgagctcagcagtcgtcgtcggctgatgataatatttattcgtgtctaataatgctcttatctacatcgtcgtattcgtagtcgtcatcgtcatattcacttggttcgtagataaccaaaggaacgaagtcgctcttggactgttcttctctatttgcttttgctctttgagcatagaaagcagcgcatcctgaaaaaactgagacaaggatagcaatcactccccatcttgaaagatgccatctcaaactttcgatttctgacctcatcgctgaatttaattcggtggtgattttatggttggtctcttggattttcaagattattctcttactttgcaatgtgttttccgacttttggtcgttgatagcgacctggacatcgttgttcagctgaagaaactcgttatttaactcatctgatatcacacggaaatctctttccaaaatactaataagggtgatcaactcgttgatatgctgttctctggatcttgtgatgtctacacgtaattcctgttgagcgctttcaaagagatacttttcattctccaattcgtactcttgagcaaattttgttgataatttagatagcttggagtttaattgcacaaccaagaagttaatgatttcatcggcttgtgatggtgtaaagccagcctccacgagttgagaatatacagcatacgtatccaaatatgggtccatgttatcgaatatagttgtaagaaagtcattttcagagctgatatctttacctacctctacaggctcaccttggtatgcaacaggacttggtccttttgaattactttcagattcacttgctacagtcttcctatcatttgcctggttgtcgttttctgtctttttaggtttttgagtcgattctcttgaatctgacggttgcatagaaatcgctgaattgaaaacgtagctatgagtatgaaagcttcgatgagcgtagttcattcttatggtatgttgcagtatcctgctcagactatacacaatatatcggtatgaagaagtgaagtggttgggacatcttagaatgcttcctctaatcatcttgagaaaaatctgtaaattttgaactcagtaatatatatatagttggtagttgcaagttcttctattcttttttgaaatacgattgatgtatgaaaatcaataaaggtctccttgtaggattctagcttggttcctttggtgagttctactcaagtagcaataatcgtagataaaacaaacgagtacaaaatttgaaaacgcgagaacatttccgtacatatacttccctagaggggattcattagcgagattacttcagccgtgtaggtgtacacaacatagaataattatatacgagtttattttttttgtactctcttagttcccatcaatatcagaagattctttagtaggagttttatgcttcctatctgttcggagccacttgaatatatacttcaatggagcaagaattctttctaattggtcgtatccattgtcaataaatgaaacactttttggttttgccaaatacttaaatttgtggatagcaaaagaatagagagctctgttaaagccattgaatccaaaaggaaggtgagagaaataaaagatactatctacactttcactttgttcactgctccaacgataatcatagttcaggtatccttccgcaacgaaaacaaggtcagtagagggtgggaaaatcagattgaattcaggaaattcgatttcgtcaagattacttttgaccaatcttaaaacagtctcgtctcttgaaatcgcatcacataggtaaacaatcaattctcttttctccggaccagcactaacgatgctatcgatagattcaggcccaatggtgtttgtatctgggtctgtggattcagcctcatttacatggagtctctcattggaattcatatgaacaagaattatctttgggagattcactttgaactcgtctaactctctgttgttgcacgcattgctgaaactatgtagttcactcaaaatggcatcagcaatattttggagcgactccactaaactatttgagactaacaacccaaatctctcatagatatagagctcattggtagtaggcaataatgcactccaagtgacgaattttgctacttcagtcaacaacttcaccttttctgctgccaagttaactctgatttgagtgaagtagtcgtttctaagggccaataccatttgtacgtcctttttatcaggtacttttatcttcttttcgctatccaaatacggttgagggatttcaggaggtgctgcaggaaatagattctttacgttaagtatcaaagtcatcgtttcgggtaagtctctctttggagttgcgagctgaaacagcgaaagtcccgaaggtacacaccaaagcatctgttgatagatcactctagataccacgttgggcatgagtgaaagataaagataaatggccgaaacttggttaatagcagagtacttcagcattgaggagtttctttgtacagtcgtatttaattcataacaacagatagagtttatctccttgatgtcgtcccaaaatctcgcatagtaccagtattgagcttggaaataggtccagatcgtcaaaaatatccgcaacatgtgaaccctcaagatttgataggtggtgatatcaacaacagaactatccaaggcattatacatccggttggcactggtgagcatgaaatttctatcatcaaatcctttgagatctttaaacccaccaagtttattggccaatggctgagtgttgttgaagtaggattcttccaacttgtggacattttcttctgtcaacctgtcaactcctggagatgacattctactaacttcaaatagaaagatataagataaataagaagaaaagaaagcaggtaagaaagaacaaacagctgaaaatattctgctggaaattgattcatcaaatgactggtaacatcgaattgggataattgctgcaaaaatgcatgcgtacaggaaatgcctacaatattttagatagccttttctcgtatttggctgcgaactactaaaattcaataaatgtgtaaccaagatttaattaaatttctaaatattatacagattggaaaattggaagcgatcgaaacgcaaagtggtgtttttgtgaatatctcatgattctcagaaaatgcaaaaaaaagttcagaaagtgaatctattgttccatagaagcatcttggaattcttcgtctgcttctttagctggggattcgtcgtattcctcagttgtgctgtcgtcgtcatttttgaatggttcaatagcaatcgatactaagttgtcactcttggagattggagcaccttcatttggtattatcaattccaattcgtcgtcgttgatgaatctggcttggatttgatcaaagtggacaatcttgtcgaattggaagtgcttttcaaatcttatttcgtggttcttgaagtccttgataagggattgagtatcttcttgcacttcttcgtcctcttcgtggtcactttcgagatctaagtcctcgtcgtcctcgccttcaaaaccggaccattcgaagctgtcattgatggcagatgtctcttgcaattcgtagtcatcgtcatcttcttcttcgtcaacttcttcgacgtcctcctcatcgctatcgtcatctttttcatctgcttcttcttcctcttcctcatcctcttcggcttcgctttcttcttcattttcggcttcttcattttccttagcctcttcgtcatcgttaacttcttcaaggtgaacttcaacttcaactggaccttcttcgtcatcatcttcatcttcttcctccttttcgttttcgatttcaatttcctcgatgtcagagtcgtcaacgtcagtgaagttgaacttaccagtaattattaattcattttcgtttttcaagaagtcaattttcaattcatccttgaccaaagatggaaatctcaagttcaatttgtaggtgttgtcgtctaattcaacaatttcacagtccttgctgttttctaagtcgcctgacaagtcgatgacctcaatctcgtcttcactgtcttcggcttgcaaataaccgtcgctgtcgtagagatcttcatcagattcagaatcaagcaactcttcatcggtagagtcttcagcactttcgttacctggaaggtcgaatctgtgtctgtagatagtgataccttcttcatcggaagaatcagaggagtcggagtattcgtagtattcgtagttgactggatcaccagcatcgtagttttcttcatcagaagattcaatttcaatgtcagagtcaatttcaaagtattctggttcagaacctaattcagagtcttcatcttcagacaattcgatttcatcgtcactgaccaaaccttcttcgaaagtttgtctaacgttttccaattgtagttggtctcttaattcttcttcgtcggaattgtagtgcaaagattcatcttcagacgattcttcgtcggagtcagattgttcagattcagcaccagcgatctgtctcaaagcttcagcctgcaattggtcgttcaagtcaatgatgtccaatatgtcttctggttccaagtccgagtcggagacagagtcatcttcagagtcatcttcggaggagtcttcagagtcgtcttcagaagatacttcattgtcgtagtatctgactaattcatcgttcaagtcaagcactctgccttcgttgtccaagtattcaatagcttggttttctaattcgtcgttcaaatccaccaattcaatgtcagagtcaatttcgatatctgagacatcggaatcaagaaggtagtaaacgacttcttcttcggagtctgagtcttctgagtcttctgagtcttctgagtcttctgagtcttctgagtcttctgagtcttctgaatcctcagagtcatcgtcggagtcgtcgttgttttcgttgagaccaaattcgtaaacttcttcatcttcttcagaatctggttcagaatcgtaggcagggatatcaacttcatcttctgtttcagattcttcctcgctgtctggttcttccacaaacacaacctttttggatggttgctcgtggtagtatcttctgtagccaccttttctgctcttaggggcgtagtgggcctttctggcgtatctgttgtgcttggaagcggaagtcatttttgtctataagttgtcgtctatgaaaggatgaaatggtgataaatatgttcaacggaaagttcgttaaatggctattttttggaggtaattagtagaaagtaaaagaataagaacaaatagctaagcaaagagacaacacgataatctacgatgttacaagtgcttctccatattacttatactaaaatttttcagccagctgatattacgcctccatagtgggacaaatttattactgcagagatgagatgtgcggcgtttgcataattgcctttatgggtgacgagcgtcagagtgtgcatcacgtggaaaaattttcaccatctcgaagagaatagaattgagaagactctattagaattctctagaagtgcagcagccagcggaagtgtgtgagatgaggggggtcaggtgaccgcttccatagttaagctgctataaaagttttcttcgtgttttgcactctgctgcaagagccccacaataaacgggcatcgcgaagaatatatatttatttgcaaatagtaaagcgtatctagggagacggtgatggtggtagatcgtagaatgagttggaaacgaatggaattgtagagaagcaaatggttcatgtaaattgagttgtaattggacaattttgtagtagaatgcttggtgtgttttagctgcgaagatgtcgcaatttttgatttcccaattagattgcaaaaattcagccaaaatgtaaaaataggaaatagagataccccacaaaacttacaaaaatttaggaaatgaagatatccaaacaattagaattgcaagggttcgaccttgttactagtttttaatactatacattagtacaagaacacttgcctgtgtaactaggtgaatatggatgcaaaacccttcgtattgtagtatatactcattactccataactggaaataactttcagctacctaacgtacgttccaggactttatatctctcttagtttacatagcatcttcaaatacatcattgaatcagttaactcgtcctctttccatccactatttctgtgttatatgtctattgcgtttgcacccaattacacgtgtaaaataaatgttcgcgcgtccgtaatttggcactcctgctcgtagagttggagtgggaatatgccggatagtggtaatatgaatatactggaaatcgcatatacaataaggaccacctattaatcagaaccactctatttattctcgtttccagctatgttcatccagcttctttcgtatgtcggtatagtggtcggcttcgtgttcctcgtcttgtccatagcttcggcgttgtactatgtctcggagttggtagaagagcactctgagcccaccaagaggattctcaaaagattgatcctaggcatcatggctatattacttttgctttggattggcgatggtttccctttctggttgactttgttctcagttttctcatactgggtatacttgcaaaatttgaataagttcccctacgttgaattaagttcgcccgtatttctcgtttcgtgcgtgttggtggtagcgaaccatttcttgtggttcaaccatttccacaacccgtacattccaccattggaagtgagattgagaccggattatgtgccacctcgtatcccttcgtttgtagaagtgtgttcctttttcggcttgttggtgtggttcgttcctttttccctctttgtcagtttgagtgcacacgataatctcttgcctcaccacgtagaatccaacgctggcaaagataaaaagaagaacaacgggttggctaaggtagttgttgctaatcttcgtgaatggatctactcgatcacaagaaaatttggctacgaactcgatcctcactatggccaaattgtataaactattaaatgaagacattcaaagacgcactcataagaacacatgctactaattgcatactaggatgtatgcaatataactttcatttaatcctagttacttcgatactgcatttctctacataatcaatcaatcttcaccatgtaatcatatattcgtaatcctatcaaatgtccatatgctaacccaagaaatcgcgaactggcggtccaatatggtccaagctcaacaagaaagtgtcgtggccgtagttactgatgttggtgcccaactcaaagtaccggatatccccagtagtattgttttgcattaagacatcggcaatttctcgctgttgccacactggaaacaagatatctgactcaacaccaatgactagcacatctttgtgcgagatcttgctgattccgtttctcaaatcttctaaagactcctcaggagtcacagttgctgaacccaccttctccttatatggctctggaggaaccgagtgagattcggagatattgttctgcgaattccaactttgttcagtagcagttctcttttgaagagctttagaacggttggaagagctcaagtcaaacaagtccatagctttcgacacatacaaaagtgagttggcatcgtattccaaacaaaacttctcgccagcatggtccaaatacgtttcgacgaggaaatccggacacaatgctggaggacgagagtcatcagctctgtttctgccgaatctgtactcccattcaggtccagaacggtaggtgacggtagcgatttctctggccaacttcatccctacatgaggaggcacacctccgtagtagaatcctctcttccaattaggatcgctcatcaatacctgtctttgagtatgtcttaatgcaatagagtatggatgagatctggcacagccactgatagatacgatcttgttgacttcgtcagggaattcccacgcatatgctaacgattgcatgccacccatagacgcacctaccagtgcatgaatcttggatacttcgaaaacatttctgatcaactctcgctgagctctcaccatatcgttaacagttatgatggggaatcttgtagcatagatttctccattggctgggtctctcagggagggcccggttgatccataacaacctccaagcacattggtacatacaacgaagtatttatcagtgtcaatgtattttccagaaccaatgaaatcttcccaccatcccggcttggtattgtctggttgtgatttggcatgcgaagatgctgataagccagtatggatcaacactaagttgtctttggctgcattcaattgtccccaagtttcatacgccacttcgtactcgggtaaatagcctccgttatcaaggaaaatcggcttgtctgacttgtacaacttgaacccagtctgaacataagaataggaaggttctggaccggcatctaatgagctgatattgtcatcttctatgttacatgaattggagagatcctgggtcttcttctccaacttatcaagacatgggaatgccatctggggatttgaactgggaatattcttaaatgcagaaggcttgaacactggagtcgtagttgaaaagttgaacttgacctttagcctggccaaattggtgtggctccgtctgctggcagtacgagcagccaattttatgcttgctagcgaagacataatgtaaatgttgtatttgaagaagtctgtaaaagtctcaaaatcgcttcaactgcttatttatcacaagtggagtaggactttgtattattaagtctggcaggttttgcatcagcatagtaatattttgcgattaaacgatttcacgtgatacgaaaatgcaggacataatgacatgataagaggagacgcagcagatgctgcgaaaatgggccccaactgaaaaataaaatttctgtattagcgcattggacacgtgatgtttgcacacgaatatggatcaatatttggtatgctcaacttcagctttaacttcttctttgtagtgagtgaccaagcaacaatggcttccatctggtatgctttggtgctattgtatcctgctacattcgtagcgacactcccgtttttctttctcttcaagcagttcggttccgatatcgcaagaatacccgtgataaagtttctagaagactacatcattaagaactacggatatttctggttcacactagtatactttgcttttctctttggctatgttcaacccaacggcacaattccttggagcaagatagtccacacaatgaagtggtacggagccaatacggttgtttttttcttgactcagctgtggttctttggatttctgatctttgaacggataaatatagctaccgggggacattgtctcaatgaagaaatattgtcagagtacgaatgtaaatcgtccggtgagaaatggatcaacggattcgactctctgggccatttttacttcatcatctctatcagtttggtggtgggtagagaactcttggtacatttgcctttgccatctaaaattagactcccaaatggtagtggaatcgatttggaacgggcaactcctgaatccagaactgcttctactaacggaaccgaggtccagatttgggacaataaacagctcaaattgtacaggttggcagttgttatcgtcgcattactgttcatggctatatggttcttcatgtatttgatcacgtgcatattctttcatactgtgggcgagaagatagtaggtactatagtgggaggagctgttcccttagcattggcatacttcgatatctagaaatagaatagaatagaatagaatggaatagaactcgcgtagagcattgttacaattatattccatcagataacgggagatctcagataagaaaaaacgtcttgcggtacggatctctttccgatcacagggtgacttacactaacttaactctacatgtctaactcttttcatctaacgacaatgaatgaccatgtattattaatctgattaacttatcttttccatcacgccgttgtgggtaaagagagatgattgacatggggaaatcatgattctgagcgcatttagctgtgaagatatttttaagagcttcgcaacagcgaaattagcggtcttggcgcaattttttattcgcagcagcacaattcgcgcagcactatatagttagagaggtcgcttgagtttgtccaatttgtcattttgcaacttcttcatttatagctacactatcataaagagtagggaggcgacagaaagttacacctcacaccacgactaccctactgcttcgctcttgtacttcaatcctatcgaatagcattgtttcatcatcttctcatcaagtagtttttctcgctaatccgagcatcgcattcagagattcacatacaatttgaaatggaacatctccacatcaactttagcaatatccattgcaacaactgtgtttcttctatattcacagtgctatctcagtatttcgtcaacattcaacttgcgtcagctgactctgacactggcacacagaccgtttctgaaattaaggaactcagcaagacaaatccgatcttgctgataaacaacaacgatgtggacgtctactacagtatcgactcatccaagccatcctccgaacctcctatgaagaaaatcatcaaatctctaaacaaggctggtttcaagttgctttcttgggaaatagagaaagatggcactgtagttctcagcagctctggcaatgcttcgccaaatgtcgaggatatcttttcagccgaccatgctgaaggattttttgacttcttgaacttatactctaagtttgctaaatctcgttctaccaaaaaccacttgaaaaactgtgtaacttgccagttggagcaaacggccagagctgctaaggacagagactcagagaacgagacttcaacgttggaaactgtagtggaccagccagacaaagagtacagagccgtcttttcagtcacgggcatgacatgtgctgcctgtgttcagtctgtaacagctgaattgaacaatattctcaatggaggaactcctgtcaaatcagaggagcccaacttttcagtcgatcttatccaacaaagtgcagtaataatcattccaaacaagcaaatcatcaacaaggtcgtagactccataaatgacattggctttgagtgtagactcctagaggtgttgccagtgcagagatccataaacaccaaagtcactgctatcatcagtggtataacctgtgtagcttgtgccaactccatccaatctgcagtcaaagaattaccatttgtgttggactctggtatcaatactgtaacaaagaccggacaattcgtgttggaagaatctccttctgataaagtaaatcatttggccaagctcaaggagacaatcgaggactgcggcttcgattttgaagtagtatcaaaagataagataaattatacttcatcaaggaagaagtccagaacaattaacatcagtgttaatgggatgcactgtgaacattgtcctgagctagttgccaattacttgtctagttatggtgaagctatagtcattaatgatcccataactttagaacatccattcatcaagtttacatacatcccaaacaatgatgtcacagtaagaaagtttcttcgtgacttgaaccatattgttccaagtgaaaacgaagacggatataccttcaattatgacgaacaaggtgtattcaattgtgcgttagtggaatctgtttctatggatgaacacttgagaaagctttccaagaaggagattcttagagtcgccgtaagactattgattgctaccgtatttgccattcctacgtttgtgtttggaatagttgccatgtcattattaccttccagtcacccatttcgtatgtgggtcgaagacccactttgggcaggtaacgtctctagaaacacctggatcttgttgtttttaagtacacctgtctatttctttgcggcggacatttttcatcgcaaggcgattaaagaagtcaaatcgttgtggctccataagaattccttcaaatctagactatttaagtttggatcgatgaatttattaatgtgtttgggtacttcagtttcatactgggcttctattgttttgttaattttgagtgccaagcaagaacctaagagccacatgggctttcacacaacgtactttgactcggtcgttttcttgactttcttcttgttgatcggaaggcttcttgaaagctattctaagagcaaaaccgctagtgcaattgcgaatttgggatcattgaaagtttcgacagcaacgctagtagatcttgtcgacgacaattttgctaacgatgaagtcatcgatgtgaagtatctagagacaggtgattatattcgtgtagctactggtgaatcccctccagtagactgtgtcattgtagaaggctcttctgaatttgacgaatcagccttgaccggtgaatcagtacccgtcaaacattcatcgggccatcaaatattttccggtactgtcaatactggcagcaatgccgtgatagcaaaaattatcagcttagaaggcgattcgttgatcgatcaaattgtcaacactgtcagagatggtcagatgaggaaagctcctattgaaaggactgcagacttgttaactggatacttcgttcctgtaattacgttattagcaattattacctggataatctggttgtctcttggacattctggagcattgcctgatgggtacttggatatcgacatcggtggttggactgtttggtctttggagttttccattgcagtatttgttattgcatgtccttgcggaattggactagctgctcctactgctctttttgtcggttcagggttggctgcgaaatatggtattttagcaaagggtggtggcgttgcattccaagatggtgccaataccaatgttgtctgctttgataaaactggtacattgacccttggtgaattacaagttactgactacgcttttgcttctcttaatgaaagggatagtgtagtcaaaacttttgcattacaaactgctagagatttggagttggcatctaaacatcctttggctaaagctgtcagatctttcatcgaaggctacgcatttcctaagcatgacatcaagagtagccagaataaggtccctcgagtagaaacaattccaggtaaaggtcttcgtggtgagatagagtttgataacggaagtgatatttggaatgaatacaaaccttccgaagtaattctaggaaatgaagctttgttgtctgactgtggtgtcaaaataaccgctgaccaactggaagtattgaacaagtggaaatctgagtgtaagtcaatcatcctagtggcaatcagggcaaagctctttggggatgaactgttccatttggtattgatgttagctacaagagaccagcttagagcagagacaaaaaaagttattgaatatctccagacgcacgatatcgaatgctggatgattactggtgacaatgcaattactgccaaggctattggggaggaaattggtatcaagaacatagtcagtgaagttttacctgccgaaaaacaggcacaagtcaaaaagatacagcagttgaagaaggttgttgttgctatggttggtgatggtatcaatgatgctccagctcttgcaactgccgatgtcggaattgctctttcttcaggtgccgacttggctgtgacatctagtgatttcatattgttgaataagtctcacccattgatcacgttggttacattgtttgatttgtcaaagactgtgttcagaagagtcaagttcaactttgggtggagtttagtttacaatataattggaatcccaattgcggctggcgttatttatccgtataacaacacgaggttgagtcccgtgtgggccagtgttgcaatggccgcctcttctgtcagtgttgttctgagcagtttggctttaaaactctacaggccgaagataaaatcagaagatttcaaattggaagaaagtgccgctgctctagaaccaaaggagcacgaattctagctaatagtttagaacatgattattaatactgagactatgttacgaaatcttatgatatatgctaatagattactttaagacgatcttgagttcaaagacgttaaatattatgatatatgcattgcctatacgaaagaagatgctattagtaaggcgtaaggcacagggccctgcctttcaaatggatcgtagacaagtgtgctatggcttaggctatcgttgttgtagaagtgtctattgtaatctgtggttgaacacattcttatcaaactttactatcatgacagttacgttatcggtggttgagttgtcgattgccaattggcacaatttctttgcagcagcctgtggatcagcattatccctgtcactatcgaacaagttttggacaaatctacaagctttctggtcggaaatcacatcccaaacaccgtcacacgctatgatcaagaattcgtcttcaggtgtgatttcagtagcagtcgtgaatggtcgtccaatgacgatatctttcatatacgagtctcctagcgatcttgtaacagcaagaacaccgttgactctgttcttcattaccaaacctcccgacagtctaattctatttacttcgtttacgtctattgccttgtggtcgtacgagagtctgtaaggtttacctccacgacacaagactattctcagatcgcccacgttagacgtatagagcattcttcggtggttaaatgccggtacgaagtcaaaactgattggcggattaagagtattggaagtagagttttccgatgtgctagttgcagatttgctttcagatttactttcggctgatggcttttcagctagatcgtcgcctacagtttcccaacgaagtactgctactgctgcagtgctgccagaagagcctgcgccttccttttctatcaactcgtcagcttttacgaatgcattacaaagattgtctttcaagtcaaaacggcccagcaagggagctgcattgtcgtcatggctatcgatctcgttttctagcaaggtgtgcaaattgtttccacaccatctggcagttcctttgccggcatggccgtcaaaaatggcaaagtagccccaatcgacacgttcggcaaagtttgcaatataggtatggacatcttccattctgtttctgaaggttgtatttttgttttcggcgactccaactttgaacgagagtccaaagaacggatcactggaatccaacaactgttccagactagtcgagttgcgggctcgggctgttcccggtactctgttactattagaagatgtagacgtggatatggacggaggctccgacgaatctgcggattgcgagctcattccgatggatctgttgtgtattcgtcaacggttgagatcagtgtatatgttgtaaatgtataaatagtggtggtaatagtggtgaaacaacgcaagaatctgaaacgtcaaaaatacaaatttcgataataataatatagctgaagaaagttgattcagaaattaccagcttctgctttatagtacaaattttgagaagatacaaccgccaagcgtccaaatagcggttgcggaatcctggagtgctgtcccgagtgctggatgatgatgcggcaattaaagtaaccggttgcaattatgacgaaacaacaggtacggattcaaatacgtttactgaacttttgtagcaaagctgggggtgactggatgcaggcagcggcaagagcatatggaaagcaagactacaaatgggtagagacaaaaagacaggcatggagcgaggctggaggcggtatacgtttagagtctcagcttctattctgtattacaagtaatttggcttttatatacgaatcaaattgaggcttccatggctgtccaatgctggacttggacctggtagaatggtgagctgagagagaagtggagaagagtggttctattttaagtagcgtgagtgctgcgactcgccaagggtgtcaactgtgtacagatcggtgcagcagtgggtacgaaggagatttgagaaactgagttgaattccacatatttcatggatacaaaatccaaatttacaataaacaatacgactcctaatacgtaacaccaatatttaaatatataattcacgtctagttacgaagtatagatttatgtttatttgtcattacaaaattgcaccaggctcgcaatgtagtacgaccattttctcttgtcgtcgcaaaacggctcgctccctgtacaagacttttgtaggtatctgcagcggagattttgataaagaggttatttgtaccggagctgttttggattgtaggaagaaaatcagaacatcgttggaaggatttaagtgtatctcactatattctatccatgtaagtttctgtcgttgacgccctgtattctctgagtttgtaggcagtgtacccatttcctattcgtagtctattctctctctctcgctacttctctgtgctctcgctatttctttctccgcaatctctcgctactcgcactataattaacaccacttgcgagacagtctcctgcacaatcacagtgcggttcccgactctggagctaaggctagttggttagaatccacatgtcattattttgccagtgtggagctttctgggagttcagtgtttacatattcattgaaaataatcaagtgatccttgccgttttttccctgcagacccgaacttctgagccaccattcgtatttaaggacagttttcgctctttcattcattattcattattcatcatagcttaactagctgaaacattcattctgcaattgtactatggccgtagagattccatacaaacctgtcaacaaggttgttgtagactttgttgattacaacggcgccaagttcagaacagcctcgtggtcggttcctgaaggttcgacgagaaaggggaaaatcatctttgttcacggcttcgcagagctgcacgaaatctacaccgaattctttgacaatttgaccagcaagggttacgacgtttttatctttgagcaacgtggagctggggaaacatctccgggtaaattggtaggaaagactgacgatttccacactttcaacgatttggactttttcatcaaacgtaactacgatgccagaacggacgaatctgaaaagttcttcttaggtggtcattccatgggtggaggcatctcgcttaactacgccattcgtgggaaatacaaggactacatcaagggtatcttcgttagcggtccattgatcaagttgcatccagactcggagcccaatgtggtagtcagatcgttatcccctgtgatcaactttttggttccatttttgaagatagactcaaagttgaactacgactacattacctctaacgacaggtggaaaaactacatcattcagcacgacaagaagttgataggcactgttagacaattcaacgatatgtttgttagaggcgaagacttgctaaagaaggacttcgtttccaagttcagccctgaaattgcgcttttggtactccacggtactgaagaccacattaactacatcaagggtacagatgaatttgtcaaactcttgccttctgccatcgagaagcagttctatcctatcgaaggagccagacactctcttttcattgaaagagaggagctttacgaagatatcttggccaaggtgttggctttcttggacagccattgatcgctaaactcgcagaatttggttcataattagtatatagatggtaattagttaatctacattagtgtgatacagtctgtattgaataaaacaaaacgaaggggagagaccgtcgatgttcaacgacaaaggtgttccattcagacaaagttctggaaaagaattgccaaattggaaaagaattgctaaactggataagaaatgctgtatgggccaagaaattcattgcaaacaccgtaccacctttatgtaagacggacttccttagtatgtcaccatacaacctgattacaatcaggagttactgaatcaaggtgtacgtccgaggtagaacagccttctatagcaacggctccttttatcgctttggtgtgtccaaaatagcagttttgcgtcaggtgcctttatttacaatatctaagcaaaatcaccttttggagtatccccgtgaactgtccggaactaaaccccaattggtaaatttcgcactgcagcatttgcaatcatttttatatcggcctacatatttctcgcaaacaattaataatcgagttactgtagacatcttgtgtgctggaaagttcgacaattgtctcagtttcatggatcagaaccatccattgctctgtagttccatataaatagccattgaggtatcctgttttcgaaagacggttatttttgtctccactacaattagtactaacttctatactatttccgcttgactatcaaccataaaatgacctcttcttctgttggaccagactacgaagtgcccgttgccaaaaacgttgattactactcgccattaccagatgttgcttcaggaacattcttcaaagaaaaggaagctgacaagcctcctaagatttttctgcctttgaaaataaggggtttgaccttgcccaacaggatcggggtttcgccaatgtgccaatactcagccgatgaaaagttccaagctactcctttccatttaattcactatggactgatacttctcaggggtcctgcgatcaccatcatcgaagccagtgctgtttctcccgaaggtccgttatctccccacgatttaggaattttcaatgacgctcaagccgaaaaattgaaacctattgtagatttcgctcatgcctacaaaaaattgattgctatccaattggcccatggtggtagaaaggctagtggtcagcctttgttcagccatcttgaacaagtttctgatgctagcgtaggtggtttcccagacaagaccgttgctccttctgccattcccttcagaccctacggtaacttgcccactcccaatgagattaccaaagaagacatcaagagagtcattagagaattcggtgaagctgcaaagagatccattgaaatcagtggatttgatgccatcgacatccatgctgcacatggctacttgattcatgagttctacagtgctttctcaaacaaaagaactgacgaatatggaggaagttttgaaaacagaattagattccttttggaagtcatcgacagtgtaagactgaacattcccgagtctgtccctgtgttcttgagaatatctgctagtgataacgtcgatgatccagacgcctggactatcgaggactccatcaaattagccaaaatagtagctgacaagggtattgatttgattgacgtttcttccggtggaaacatctacaagcagcaatcgagatccaagcttcaaaccgccgacaagcctatccacgaaccatttgccagagcaatcaaggaagccgtcggtgacaagttgcttgtatcctgtgttgccaatcttgaacgcgacccaaagcaaacagcagaattaatcgaagagggatcctttgatttggctttgatgggtaaaggattcatgaagaacccaggcttagtatggcattttgctgatgtcttgggtgttaaaactcatcaaatccagcaatacaactgggtcttcaatccaaagagagaaggaatcgcagaattgattgcaagaactgaaaagcttctggctcaagagtctgctcaataagctcaataagcttgaacagcattttttcattttcttagctactagggctatattatacgtttcttgacattatataaatctgaaaatgtagctatgcttgtattgggagcagttccctttagctgacgaaaggagttatgattatggggtactcagtgaagagtgcaagtgagtctcgctgtgactcaaatgactcaacaaaatatacgattatatatggaacagtctgttcaaataagatactcggtatgtcaagattatccttgagacatgactagaaatacatagttccacgcatatacgttatctttcgtttgtgcttatcagcgttgtctaactgctctgtaaaatcatcattccttgcctcctactaccactttaaaaatgaggaaagtttgcgcgggcctgagtcatggtgagactgagactcatatgcttgacttttttcaaccgctacaccgcagatgatttcttctctacatatgtatgttgagaggcttgtgaccgagacagcaaaattctccttacgtttcatgtttccatttcgggaatactcaatagtgatctaccatctccttacattcacgtttctgacttcgccagttgggccatttagacgtctgatggatctagtgactcaaaatgaactaatttcgcacgtgagctgtccggctgggttcggtgatttctctagtattgatcggaatcaccagatggctagagcgtcgatctggaaacgtctactgctttagacgttttttctttatcgtgtctgttcctcgtataaagcttgtttctttgtcccgccgttattctttaaattcgacagcatattcttgagaacaaaaatttatcaaaaattcgagtttcttctggatttgtcaactactgttagtctaattttttttttttcgattccagattcaattataattacaattcttgtgtaaagcaaaaaaatagcacaccaattgcaccattaaaagttcaggtagcataattgatattgtcgtatctgatacattggagctgacttggcttcttataattgacaagtgacaattgacataattgaggtttgacaggcgccttacatgtcagagaccatacagtattgagatggctatataaatcacccacattttatctgtaaatattccaacacgacctaaacactcacaagacacactacaaatgggctacaccatcaagcagaagatcgacatctgcttgaaggccgaggctttccccaatatgactcaggcagatcttgccctctgggcagctgagcagtatggctctcagaaggctccctctcaaactactatatcacgtattctcagctccaaaaacgacttaattgcatcaaaagagaccgactttcaattggtaagaagaagaaagcagtcaaaccctcttcttcgaagaatcttgacagaatggattacacaagccatatgggaaaacattccaataaccactcccattatacagctgacttccaatgcgatctggaaccgtttgccgaaattagaaaaggatggaaacggcattttcaaccataagtggtgtaaccactttctcaaacgtcttaatattaaccttactggttcgccacaagacatagcatcgaaccccggacaatacaagcttaacaaggtatggaaactagacgagaaagtcgagttaaaacaatatttatgtgatttgattgctcaggataattattctccgcaagatatatttgtacttgacgagttccagcttttctattctttaccgttggaccagatcttcgatgtctcttctgtagacaaaggtttgaaacaatcgagttcttcaaccgagaactcccttacgattatgcttggatgtaacatagatggctccgagaagttgtcaccattgatcgtaggcaagtatgacagatttgatgtctctaaaagctcgcattcgtctttgaagacagctaccataagcgttagccagcataatcttatgaatagactcaccgaggcgtatcagttgttctacaagtccaacactaacaaatggataacatccagtatgtttcagaactatttgctaaccttggaccacaagttaggaaacaggaagatcctcttgttattggatgactcctcatcgcatagaataatcaatttgaagtttgaaaacatcaagttatgttacttgaagaataacacaaatcatacaagtccttacaattctctctacaacggagtcaagtttgattatttgccgatgaatttcggaattatagaagagttcaagatcctctacagattgcagcagtatttggagatgatcaaccgtcagagattgaactccaaagcaggtaacaaatctgaagaaattagagaagcatcgccagacatcgacttgagcaactacaaggctgtagcgttacaaggaatggaggtgttatcagaaaatgactaccatattccattgataaaggttattgaatggatcaagcgctcctgggactcgttgacatgcgagaagatattcctctcttggaagaaaacgcatttgttaccgttaaacaaactgtggccatcaaatgatcctgctatggttctcaaggctgacagcataattgcaccattgatttctagtactgctagttataatgcaaataagagctacgacaaattgaatgagatcatgggctacttaaatgtagtgattccctgggagatcgatgaacttttgggcttggtcaatgagatgggaaaagttactcttagctacgtctccatcgaagaaatcattggaagttgcctactggaatctttcaggggtgatgaaaacctggagaaggctgtagcagagaatgttctagctgatgatctgtggtacggctctaatgtagatgccaacggtaacgatagcggcaattcatttacaaatagtggcactcctggaagtctcttgaatcaagcatttgctacagctgctgctggaagacagaataatggagcttttggtttgtactctgatcttaattcccagtcaccgcaagcccaatcaatacaactaaatgatgcttcaagacttacatcactaatagaaacagtgaacaaaactcaatcaattagtgaaaacttgatgtctggtccacttatggataactcacaaatggtgaatgttgtagcgtcgacaaaaccaagcatatcttctatgtctccagaaattcaaaagtacactggaccgatattgccatcaaatactaaactagatgacctgggtaaagcattgaaacataaaatagatactcaggaagcttggttcggtgacaaaagaaggcagccatatttcagttctacaactaataatttcccagtcttaccttctgatttgcccaatcaagtaaacgactccataactagctcaggtacctcgtcgccgtatctttccagcatgccccccaacacaggttcaattagcaagaacatttacctagcagataactacaagaacaacgacatggatagtggctccagcatctcatacaatgatggtacacttcaacgaacagtcaagcccaatgatttccagcttataaatttgctaagagctgtattagctgtaggtcagagttcgctcaagttgtcgccatctacaattagcgaactcaacttgaccttgaaagggcttgaggaccgagtggagcaacttggaagagaagatgactctggacaacagctcgggggacgataatgtacatagaactacaatcatatggctaaaatggtacgtgtatatatgaaatacgtagcgatttttggattacaagagtagcattgaattcctacgattctgccttttcatatgtgaaatgtatttcataaaagaaactctattgaaatttgtctttttggtatgtacaagaaggttcatagcggtataaatgcttcgtaaggatttctggaatatataggtgagcagcaggtttgccttttgtttcatggttatttaagactgcgacacctcttcggtgtcttcatctattcccaacaatctagccttttcttccaatctttgtctcttttcagctctggctcttctgattctggctatctctgcttggatttcgtgaggttccttcgggatttgattcaacgtcgaaggatcaggccagaaacctggcaagttgaatttgttatctgtatccaaaccgacgtagtacataacacagataggtgtcaaaaggtaaaaaccaaactacaaaattgttagcatctaatgaagaaatgaacgaacaatacagaatagaaatctgtaatttatgactattaaatgacttaccttagcagtttctaactgtgttctcgtgatcccacctataaatctacgatagtaacccaggtgcattttggatctagatagtatatgtgaatagtatgaaaacagagttcctttgaatttgaataattccagtagataaatctcatgatgtagaaaaatgatttttagctacacaaaaatacgcacagaaaaatacaaaccaaaatcagactccgttaacaaaatcaaatgagaaactaatagagaacaagtattcatattgaaaaattgaacagttcaacttctatgagtttataatatttcattatatatccatcaaacattcaattttcattatgagtagtgactatacggcgatagagtcggatattcccgcagacacgaatcctcctccctcctatcagaatgtactgggacagatggaaacagaacaaaccaataccaattcacagaccaccaatggctcaactgggccacaaacttggactgacagactcaaggagtcgtctcaccctgttgctttactcttttacatgtttttcagattggcaccaattttcatatacatctttggcaatctcttcataggcttgattactctgaagaacaagttcattcttcatttcataattttgattttgctttttgctgctgatttctggaatttgaagaatgtagctggtagattgttggtaggcttgagatggtggaacgagactaacgcaactgaaggcaatgttggcgaattcgaaaacgtatgggtttttgaaaccgctgatcccaacagatacatcaaccccattgatagcaaagtgttttggattctcttgtatgctcaaccagttgtttggatggtgtttgcctttttgtgtgtgttgaagttccagttcttgtacttgttgttgataataatagcgatctcgttgtcgttgacgaatgcaatggcttttacgaaatgtgataagtttggaaaggctaacaatttcgctactgatatcttctccagagcaacaggcagcattttcagcagattgaacccatttgcatcgtgattctagcccgaatgggtatttttagatttcttaaagaacattagcttacgctttaatgcacggtcggtcttgagtgcaactgctaaatcggtgtggtatatcgaagtgtcgttcggctcgtagtagttgcgggtcttaataatcccatcctgatacctctgttcaaacggaagattgtcaagaatgttgtaatcgattctatccaatacttcctttcgagaaaagagttgatctctatccctaagaggtaggccatacgtagaagacgtaggagaaaatgacgaagaccaatattcagatttccagaacctgaaactgaatgacagtggcgatttctgttcttctcttggcttattctcattgaatatttcagtgaaggtgtctttattatcattatcattatcattattattcttttcattgtttttatttgaaattcgaagagaagtaggtagaatagaagtatctggggtttctggagatccatataagtctacgatttcgtctacaagattgtagtcattcgctctttttggttttaacttgagtagtagagaacgagatttagaaacatttctttttggttcatcacatttcagagcctttgagctttcatgggtagactttagttgaatggtacgagatgaaatatcattgtgagaattgaccatgctgatgatccctaatcatgaattttgctagtagtagtctttacccgctagataattttgcaactatgtgcgaaatatttcaattcatgctgctgctacaggtttgatatttagactaatatttacgatatagatacagagttacaaataccttatcatgtagagcacatataacataatcatacagcatcgcaggctgatatcatttactatatattatggctaactaataaaactaactatgttttcacaatgaatgtacaattacataaaaatatctctaatgcgcaatcctggaaaactaagacaattcaacaaagattccgtcttggtggcacattgtcaaatgcatcgactttgctggtgggtatggtctgtcatccttggaaaccaagttagggaagttttgcaataatctgacaataacataagaagcttcagtcaatgcaaactgctgacccaaacagattcttggtccaccgttgaaaggaaggtaggcccatcccaatttgttcaaggtggcccatctttctggtctgaacacattggcgtccttaccgtagtacttttcatctctgtgagtacagtagacggtgtaagcaacagtagtacccttaccaacgaaaacaggctttgttccatccttaccaccaccatttggcaatacggtgtcctttgtagaaactctgaagttgagaggaacagatggatacattctcaaggcttcgttcaagacgaacttcaaatattcacactgcttcaatgattcgaaagtgatgtcttcgactctggactcatcacccttaccgaagtgttcgtagatttcattcttcaacttttcgaagacgtctgggtttctggccaattcgaagaaggtgaacgacaataaaccagcggtggtatctctaccagcaaccaagatgttcaacaattgatcttgcaacacaactgggtctctagtttgcttgaccaattcgtacaagaaggtgtaaccgttggcagaagccttttcgagttcatctggagtgaaattcaaagctctcttgacgtagtatttagcgaccttgtggactttagcgttacattgatagaactccctgttttgaacgacccagtacatgaattggagccatgctctggtacccaagtacttctgcgaagtgttgaaagcatcagcgaattcggatctgccttggatgtcagttggaggagttaaaccaatagaagagtcatacaaagagtagatggactcaccaaacaagaattcagttgaggtatcgagggtcaacttgaagaataattcttggagatcaaacgtcttacccttgttcaacctgatatgcttcattaaaacttgaacgtgaggttccaaggctctgacgtgggcgacttgttctctggcaaactgaggtcttaacatagatctagaatgcttccatccttcgccatccaaagtgaagataccatcacccaacaatggggcaagatgggtgtgtctgaatccaagagcatagtcgttaaatttggtagccaacatggtcttcatattctctgggtcgatggtgaagataattctggcagggcccaagtagacgtgggtagttctcctatcagacgtcataaagctttgagccaaatcgaccaatctaccttcgttcttggctttaagaactctagacatgattgggattgcaaaccatttagcatctggaaggaaaggagtctcctcacaaccatgcttcctgatgaataactggattttgatgtaacgagcaataccatagatcaaggcagctccgatcaatatcgagtaccatttggtcaagtattcaaaagcaagttcagcggacatttatgaatatgcggggctaattgatataacaatgctgtttgggtaaatgtttctacgataataagactgtgatttacgaggcgaaaccaaagactggataacacggtgacgttgaagttacggttgtggctggctctagaaacgtaaaccgatggttgaaagcaatagcaaagtaagaagcaaaactacaattcgtatgtcctgcgataatgtgggggttgtgccttcattttataacttacagaaggtgcatgtgcaaaaacgggagcgatggcattttggttgcacatccaccctgtcctaacgggaatggcaataagtggaccttaactcactgtatggagtttgggtgggaactaaattgatctatacctacaggcttccgacatagtagcagaaaggtggggacttttgttggacaagtttcaatagaggagatgcggcaggaagatcgaacaaatttcagttgcaattgttgtcctaatgggggaatttgattttcatgtgaaactgtactgatcactgttgcatctggcgcctgcatgggacccttcctccgttagaattggagcctaaaatgagaacattgtggaaagtttaagtttgaaagtaactggacattacggccgatggttagagtagttgtggcactattgtcgatgctggttgcgaaatcttttgagtaattgagctcttcgttatccttttctccttgcctatatttctatggcggccggagttctcgcaaaaaagttcatgcaggcgaacttttcgtatactccccacaattcgcagtctgaacacgcttccaggtcgtcgctattattttcgcctagccaccattggataactggagatggggcatttcacatgcatatctatggaatctagaatgctaaggggacggagtgtcaacgttgtctaagtgcattcccaaatgcaagtcctggttctggtcttgttttatcgattctgctctctgcaattagcttttcatttcaaaaaaatacctcccttaacgaaaattatggaaccttaagtttctttgagttcttcgatctggttgtcgctgagcgcttgaatttgtgcgtctgttgctgaaaatatgccccaattgcaaaaaatatcattccaatctcgaaaatgtatacatagtaaagtatgatcctcctcaggactcttgagtagaagaatattgatcctcgattttagtgatagaaaaagtttttagtttcttaaggagttatggtgtaagatttacacaatgcaaatacataacattgtgctgtaagatgacggaaacaagtttgagcgatattcttatcgagagtttaaagtcaccgaacagaaattgttacaaaaagacaaactcaacagagaagaagctatacgttggggcggcgacatttatatagaggcatctacatacgtacacgagtttgctctttctggagatgtatagaagttagaaagttcatcaatgtcgaagtctgctggacttttgtcaagtaagagcaccacacaaatggactttgtttgcaagtgaggccatccatttgaaacagcttatccgctctaatggggccatcataactttgaaagccaagctcttctctggagtgaggaggcatcctgataagacgggtgaattcaagtctagttctgtctcaagcaaaacctacacgtcgagtctttattctatgaaatcccattgcatagaagtttgcattttttttttttcatatggtggtgctcgttgtatttcacgaagatgcccactattttctgtgtcaagtgtatcaactgcattcttgttccttattaggttccgttcctgattagtggggcagttctcacaacaatgcccctcctctaatatttattctagcacacaataaattcaactagaataaacttttttgacttaacaggcgttgaccgttgactagatcgcttatcacaagcagaacggttattttcctcaccgatatgtccgcacgtagtatatcttattacatagtgatctctaaatcagtttacttttcacatgcatgtgttggtactgacaatcctgacaataaaatcaaggcattaccatacaggctaccctggtgtattgttggtctcttacaacctaggcatatgataattcatccactatttgtcgtaaatgactgagtttgtcctcatgattagtgtacaccttcacatctgtagatccaacaatctcacgttctaagcgaaactcagttgccagggagttagcactccgtagcatgagaattgtttcaaaactgctgatcaactcttgcatccccacatggtctatctcaacctcgaaaccttgtagttttctttctcgatatgtcctagagacatcctccagttgtttccaaataatgcgcaaaatcaactgatttagaagtagatttaaatcgttattattcgaaaactgaattatagatttgttaagcccgctaaccttgacatttttgggcattctcttaagtatggtgatgggatcgtaaaatgagtttgatctttcgtcagagttctctataagtgcttttataaataccggcttttccattgaatagtcaagcaagatattccacgcttctctgtcgttctgattcttcgcaaacgctatagcttttattggatcttctagtttgttgatgatcaacatcaaagcctttctgttttcgccaatttttccaagtaggtaaaccaattcctccgtaaaatcattactttcacatagttcgatggccctggcaatatcatatccactatgcttggtcaagaatggaagcaatagacttctattgtattgtgcataatatttgattctctcattaccgaattgcagcgtcgcaaattcgtcgacctggttcaatttctccaaatagaaatagttcatgaaatccatatggtgctctttaaacaaatggattagctcgtggggcgggaaatcgtgtcgctgctccacaaatatatccactacgtcggccaacctcttttcaagtacattgattggtaatgtgttcaattcagcaccatcaaaccttatttgaatcatttgtggtacattttcaatgaaattggatagtatttggttttcggaaacaaacttgataatgttggcatctttcaagattatcaaatgtggtacagctctgatattatcgtctgtctttatgcataggtcaactagacttcgtcttaatgtctcgttgtcggactgctgttcaagcaattcttctaacttcgattgtaggttcttgaaattgtaaagttccatatcccatttctcaattagctcatgaaattttgtgacgtcttcgataacccagaactcaagaatacgttgatatatctctgttgggatattgagagctgccgttgttggaattatttctgtcaattctctgatatgaccagtttctatgaatatgttggaccacgtaatccattgctctatgatttctttgacgtatttatcgtggaccttctcaacaccattttcgatagcatctatactcttggaatcgagttcatgtaaatcgctgagatcaatatacaacaacttattcaagaattcttgggcctgttgccagttgttggctttgattaagttgtctacatactgaattccaaaattcatacgtcttgaaggcgattctagatgttcacttatttcccaggcttcgtagtacttctccctttccaaaaaccatgccaatctgtcactcaattgtagttcttctgctatgactccatctctcgcacaaattataaagtacttgggaacagtttcgatatgcatacctagtaaaaagtcgttcaatccaagtccagcaatattctttaaacccaactcttcttcatactcaacttctccattagtagagttgatcaattttatatctggatttggatattctctctttcctgtttcctcatcagtagtaggaggctcataggtgagaaccatccaaaggtcatctttaaaactagaaattccactgatgagcacatctagcttgaagatatgctcaatttcaacttttttttcttgcactgctctaaaggatatgctagctgtcgaaggtaagatcttactcatagacgatgaagctatagtgccgtcttcttctgtttttaacgatacccttaacgaccatatgtaattaccccagcctattatgattctatcaatctctggaaaggcaactctgggccagtaaaggtcacttcgaggagaatcttctggtttatcgataacacagatgatctggcgatttgctaagtggcatacggttacacctttgtcattcatccaaagtacgagatcgtctataagctgaatagacactattggacccatatcttgttctagaacaatatcagatctctttcctaaccaacttcttgtcgaatagatcactttgccactcatacctccagatataaagcttctagtcctatagtagttacggtctaggactatggcatgaacaggcctctggaaatcatgagctacaatatccttttcatcacgaatagagcctatcactacagttccgtccatcgacgctgtggcaaagtatacaccgtcggtgtatatgcaaagtacggaagctctgtgtgccttaaatgtccgcacaacagtgaagtctggcttggtaatacagacaatgcctgaatgggtagcaaacaaaaagtacgactcatggaatgtgcaagtcgatacgggatccttgttgaagaaattgggtggtaattggttcaagcgagtatacttcaattttggtgcttcatcgtcttcatcatcactttcgtgttcttcgtctgcggaatcttcgtttgtatgtgaacttttatatattccttcagaatcttctatattgccattattctcttcttcccctccttcgttcgtaagttcatgtcccttttcagtgacttcttcattgttttgtttaactggttcttgtttttcttgtgcttcttcaatagattctacagctgcatttaatgttttatgagagtctccatcctcttcaattggatttccagaagagtcatcgttgatttttggaccatgaatcggtatctgatcaccattttccatattcctgattgcttatttttatttagtgctactagaaagatatactattgaatatcttaatacattctgtactcatgtctgaaaacacaaaatcggtcgcactacttctacgagattgtatagaatatgagattttgcgatttatgaaaagtttccatctttatgttgattcttctttactgctttcaaattcaaaatggtaacagcagtcaagggtgttcttgtgctgtgtgatccgtccatcagagcattgatcctagaaattgacaacaagagcccaggaatcgtcttggaagaaatggacgatacccatcttctcatcaaactggacaagatcaaaatcgtcaaagatgagttgaacaaccttttatccaaaaatatctacaatccgtttgaggaagaacagtagttcgcaagttagtatttcttacagatattataagtgttgtgagtcattggtattacttgtttttgaaaatcagtaggcaatttttgttctacacttcctatacatctttttcactgctgaatccgttggatgcgggcaatgtttcttcagcagcctttccatcttcgatttctctgtttggttcaactccattttcaactggttccggctcttcttcatgaatagtttcgggcatcggagttgatgcctcttcctgttgctcttgtaaagacactccaggtgaagctccaggagattctcctaacgaaaccgcacgtctcacagtgtcaggcttctcttcaaggtccaagtctttcaagatatcttcattgaaatccaaattaactaggttctgtgcaaggtccagttcgtacaaattgttgaccaagtcattgacaaagccatatagagtatccacttccatgatatcgtcaaattgttttcgttgttcgtaattgagcttgtcgaggtcttcagtgaataccttatagaaattctcgtatgtagcaacaatcaaattgctcaaactgtacatcaagaactcgacaattcccgagttgttgatatagatcttgatctgtgtaaaatagttgggaatcttaatgatcaaattgtctttgaactcagcactcctttccaatggacgctgtaagaattctgatttgtctttgtcttgagccttaaagagaattggttcacaaatattgtttgtagcctcctgtacaaattcatttacagcattgttcaattccaactcaatttcatagttggcgtcgatcatgttattgatgatctttggtacagtcttcttagccaattcgatcaacccactgttatcaaacgtaatttctccatttcttaatgatttccagatgtcagtcaatccactagtgaagtctatagtgtaatcgttccgggtatacagaatgtcgaagttgttgatctgacctctcaagataatcaagttctggagataggctaatttggcatcaatcgtgcccaaatgggtcagtgaaagtttataaaattcacccttcaataagataatactggaatgcacgatgtagtgagcaagatcgtcaaatacccttgaattaatcaattcgtatatgttcgacaacaatgtcaatgccttacccaaaggcaagtatacgtccttaaaaagattgtcagcatagtcaacatctaatggatgtacttgttcgatgctctcagtagatttgtcattaatgcttgaacgctttcttctatttccaatcttcaaatcttcgggcctgggtttgaatttcactaaggtgtcatcaacataacgttggattctaaagatcaatcttgtttgaacatcttcaagaattggttgaaataaaaactcgtagttgatcgagccacgacggtcgaggtcgggaacaacactgctgttgtcaatcaatatagagtcttcgtcttcgaattcatagtacttctgtaacaatgttgcaagttggcaaaggttggaaatgttcacttctcgtaacactagctgtcttatgctgtcataaagtgggtctaatacgttcttgaggaattgataaagttcctcattgatgaaggatggaatagattctccttcagaaataaagaaccttttgaataatgtgacttccttttctacagcatttttgaaaaacgaaatctgatcttgactgatttgaaccaagtctgtaccgctatagttttgactgaataacttttggatggtcgagttgttgttgatatacatgtttagcaaatgtaatcgaatcttgaagtagttgtttaatacatcatttaataatcctttgtattcttcatgccccggaactctgataatgatttccgtaatcaactccttaaaggcttctccattgaattgcaagtagttgttaaactcgttgtagagaagcaagtcaatggtaatgttagacttctttttctggtcctgatctttgagttttcgcaatagcccctctgatattcctcgcaattcattattctcatacgacttgatcaaagttaagcccctggtgaggcactgtctaaacctgctttcatataattctacatctttgaacagaggatgttggtggatgaatatgatagactcttctaattgctgaagtatatcgctcttgaagaactgtctacgatggtttagcaagtgcgagcctgacttcgacaagttcttcgtgattttttccaagttttcgtaatgtttaaggtagttctcgatctgtttgaatttgttagtgtatgtcacttgaaggctcaacaactcgctagagactttgtcaaaatcttgagtttcatgggagatctggtcatacttggccatcaacgtgccaactgagttcaatagtccgtctgtttcgtcgataaactcagcgatctgcgattggttaaccagaacgttgtactggaaattcaagatttcgtccagacgtaagtccagaatagcttctatagtttcctgcttcaacaaacagtcgtaattgtacttttcgatatattcgtgccatataagagcggactccttagtatcaaaaggatacataaattggttgaattgcggcgtttccttttgctcaactcttgtctcagtctgacttgtgaaagacttggatcgagctagtctgaaagtcgtgggagtcgtagccagagttccgagattgaggttgtcctcctggtacttcggcacatccacggcaatcttctgaactatagacttgcttcttccgcgcggcatggctgggtgtgaaagactattagctttgatggaatggtattcttgggttgtatattccccactgaagtaacagcgattcgaatgtacacttgaataattggtgtgcaggaatgagactgaaaaataggactctaatgaaaatttactatggaagaatcaaactgaacaataatgagagaatagaatagcaacacttacatatttggttggagaaacgaattttatacaaatgagactacagtagcgtggaacaaattgacaagtcgtaaatattgtccctttttttccctgtctttgctgatatctcattctgaagacaattctgtgggctacgcgtatttacttctacacgtacttcatatagttatctagaaggaatatattgtcttccagatgatttcaatataactctttgtatataacttttgagttgtcaacgttattcggtcaatatgaatgaagtagtagatccgcgagatgaacatatcgataccgatgagatcctcaccgaaagctcttccgacgaactcaatgatcttgtcaagctgtttgaagccaagtacgaggagctcaagagaaagaaggcattaaaaaagctgcgaaattcagcaaacgaacacgtctctcaccaacaaagtagcagtatcctgaatgatcacgaacttatcaaatctgctatggcacaggttgaaacgactccaccaccatctccccaacataaaacagcaccatctctgaaaaatctagtacagagttcatataagccaactataccgaaagtacctaaaagtgatgtcaaggcttccagttttatcagtaaattgtacgatgccaatttcgcaagcaaggctcaaagtctccagaagatcgactattctgaacggaaatttgaatttgacggagttcaggagatcaagtctgtaaatattgaagctgatgaagtagagcctatatcgcgtatgcgtctaagaaagcgatatatcgaacaaaaatcggtagagaagctcgtatcggatatcaatgaattgaaatacctccaagtggacaagttgctagccaaagttcacaagggtaataactacgctgaaccaatgtataccaactggtgctttgtagggttcgttgtcaagaagtcagaaccaaaacagtccaaagacaagaacaaatccaagttcatcaagctttctgtaggtaattttgtgcgaagtgtcgatgttcttctatttggtgaagcttttaatcagtattggaaaattagtcctggaagcttggtattcattcttaatccttacataagtaagtactctatgggagaaggaaatggcatcaagactggattcaccttgcatgttgcaggtaataatacaaattcaatattggagattggtgctattcgtgattatggcctatgtacttttgtgaaaaagacggactattccagatgttccaatgtcattgatgtcctgaagtcatccttgtgtgatttccatcttgatacaaaatacagaaagagcagcagaatggaattgaatggaagtgtgatgatgaagtctccacagaagaagaaggcagctgtgtatttaaccaatgaaggtgttcaaggaaatggagggtttatcagattcgctaatgagaatactactttgtatgaatctggaacagcaaaaatcgatttaaaaagataccacgatccccgcattctacaaactagtgaaaagaagaggaaaatgaacgacgaaagagccaatcagttattggaaagaaggctttctaaacttctgcaaaattctggattaagagctctacatttaacaaaagatcagcataaagaggaaaattcggcgaaacactatgaaatgaagaatcgtggatattcgcacaacatgatcagcaagctcggcttcgatcctactactacgatggtgaaatcacaagatgcaagctacaagagccccacaaggaaaagacgcgagcacgaacgagtccgagaattgtatgagctaagtaactctaaatccaaggaaagaaccttgagaagttcaacagaagatcagaagtcaaaaatttcaaagtggcaggaaaatatacaaaacttgaagcgttacaaggacagcattaacaattctcgggatccattctctgactattcatccaacaccaaaactattttgcatctccagaaaccagcaaagaaccgcgtaattgatgatactgactcttccagcgacaatgacgatttagatatagaattcgatacagaagagatgaagcaatcatatctaaatagagttagacaatcttgatgataatttaataaaatgaagatttggcattcattcaatagtttctaggtctataaatgtacatgtaatgtaaaactaaatgggctaacagatgccataagggctagaacacctcgcagtacttcagtgaatctggctccaactattccgtcccaacccaaatatcaccgtagtactcgaaaaggttttgtgctttatcatcaaactcgaagatatagcctgtttgggtgttgtcacctccagtcagagttcttcctccaatctgagaatacgcacaccaaaggtaagacttgcagtactctttatccatgtgccatccttctttgggttcttcatctacgttatcacaaagagtttccttcttgttcttgaaaggaggaataatggcatgcgttatcttcatagggtctctgtagaaggtttccattgcttccttgttcttcaaaaattggaaacgctttcccttttcaaattcctcttcgaaattgacatccttggaacagaaattgtaaccagaattgaaccaggccaatgatttaccatcttcgccattgatgtgtcccggatgagcagcacaaagttccttagccttcttcttacggccgccagaggtgacatggaacttatcatcggtcaactggccgatagcagcagcagaataggaattgaacacatagtcttcgtctccattagcagcaaaagacaagaagaaaagctccttgtctccgtatagtctgtgcatcacgggacgcatgaagctcatctgcatcatcaacaaaatagagttgaaatgtctgtttctattgagaacaaccacaccagactccataaagtgtgacatgccgtcaaagaaaggcaacttgattgtgtagtcagtcatgataggaatgtcaaacatcacggaatcaacgatggaaggactggtcttctggaagaaaactgagtcaccaggaggtctaaactgaggcgcggttctgtctctgtagaaataggcacccttttccttgtatccgttcaattcaaaaaagaactctggagattgaacaaacacagtatcggcatccacaagaatgaactcttcaaacgagttgaacatagtagccaaaaatttgttggagaattttttgaagttgtccttgtagtttttagcaacaacactgtggacgtttacaaaccagatctcttgttgaggtaaaccaccgttgtccatgtaatcatcagggaagtattggtgaaccttttcgaaagacttcggaagcactacaaacttttctctagctgctgtgacaagtttactcttggacttctttgaaagattgtcgtagtaaacgatttcaatggggtacttattgttaagagcacgcaagaggtgaataaaacggacagtttcgtccacatgttcatcactgatagacatgacaagacccttactgtttacagagtttttgaaagtgttcaagaagcagggtacattgttggtcattttcgacttaattggttctttcttcttcaagttggccgacttgggcacatcgatgaattcagacatgtctggaggagtcatctgcatgttaccactccatctttcatagactggataatctagcgaaagccatggatagagtctcttctcaagatgggcacaattctcgaacttcatatttactctcttttcggacgaagaaggaacaaacgggggtggcactgtcgactggccaggctttggaccagccttgaaaaactgtttcatgaacttcatctggttctgggagaagtttttgacacggttgacttgggcggcgttgtcgttggaaacgaagcacttgttgaagattctcatgtgactcaagtagtcagtaacaacttgctctgttttcatcatcagatcccagaactcgtagtacttcttcttaatgaagtcttctaagtcttggtcaaccttgacttcatcgaggtttttatcttctgtatcctcgcctttatccttgagccattctttcttgagatcgttcaacatcttcttcttccatttgtcgtaactagtttcgtcacgatgttcaaagtagaagtcgtacttggggtctatccaccagtcaacatccatagtgtataaagtggtgaaatacaactcgcatctatcctggaagtccaagttagcaagaaccgattcgacttcgtggttattgaacattacatcatatactgtagagtgagaatccttcttacgggtgtctttaactcctgtctgcttatgtaacaattgaatcgatatctggtcaatgaggccgggctgtggtttcgcgtgatagtgtggatctgaagacttgtcatttgtcttctcgtccggtttgttggacttgtcatcgtcggggttgataaagtcagggttgtactcgtcgtatatggaagaggattcatccttgagaggagttctggtggagtggtggtagtagttgaagatccagaggttgacgcatatgagccacaacacaagcccagcatacactatgactttctgcttggatctgggaacatggagcttatctctcattgtgtataaaatgaattaacgattgtgagtatgcactataaagacagtaatgatgggtgcaataatggaagttgtgatataaaggagtaagtattcaacttttgagcgggctaagagctagcagctgcaaacaactggagatggtatctgatgttgttgctagtaataaagttagcaagaaaaattgtgggacttaggagcgagagcaatagtgctgaacaccgacacgtcaagaactgtaaatagcaggcaagactagctagtagtgggtggaagtcgcagttgccgtcgctagcaccaagcaaacacgaatagttggtatgactaaaaaaatcaactaatgctgatgaagaagaagacacaaggttttaagggaaaaacacattcagatgaaatcttccaacttcaatccacgtcctcgtcttcaacacaggaaaaaaaatatgcttcaacacgctctatctgtgaagatccgatcgctgtgaaaacgacacatcttgtgactggatatagaagggttaggtgaaaactcagattgtactaccacgttgttgcagtcaacttgccgtcggcaaaaatattcttcaaggctgcagtcgtgcatacatgcacgttaatcaagagtgggcgcttaattacgcccgatgccaggagtgctcacttcaggggaaagcagggctggatccagcaatgtaaatctaacgtggaccagatacgaagtcagtagttgtagcctgttgaagatggcgacgctgtcttcttaaaattgtattcttattgtgggctgaaaggtatggatggcagcgtttgtttttggagtgaatttaacccatgtgcattaatctattttcgtttcgcggcttatatttattatgtaagcgtctgggtttaataatcaacccctgtgggatttgagtgccttcgcggatattaatgtaaaaggagatccaattgatgtatctgtctagccaggtgcgccaggggctgccagacttgcctcaagtcagtttcattgtcttcttgttctgcccaagaatgtgcagcgtctcaaactctgactgttccagccatagccaccttgcgcactaaaaatacatcgttatcggttccgcatccaatttggggaggagcgggcacgtgcgttgatagccgttttttcttggtcccaagcttctcagccatagcgaaagcaagaacctcaaggcacaaagtgaactccgagctgggagaagtaaaccgaacgctctactgacgtttagagcttgtttataagtcgaagcattcttgcaaacttcaaaccagtcacaatacttagtaccatccagggaactacactcgcgttaacttgccaaagtccagcatagaaggatggctttcggttattttactaccaaatttaactgcgattttctagaacactagttctcaattagaatttttttgatgctatgtactgtctatctgctagtagcgatctcattaagccgtgataagtcactgtccaatctcttgctgaacggccatatggaactatactcgctattcgctcaaattcgctcatattccaaattcaccgccaaatgcaccattttggtgctggtacgattgccggaaaatattctcgtaattcaccaaataccagtttttggccacagtattttgtctagggggtagttcgacaactaatattaactaatatttggttgacacaacatgtccccagggctcattgtatttacttaagtttttaatttcgtcaaggtcgaacaattggcgactgtagtaagaagttaccaggctcacaacggagtggccaacctcaactgtctcacgtcagtatggatcttctctttcgtttgtttctgccaggtgcgtattgttcctaattatagacattatgtaactgtgcagtgcaggaaggagaagccaacataagccctgcgcaagtatttgacaatagccttggttcgtagccgatctccggccgcgaggcccttcgagaactatggcaactggagcagacattgacaaagtcctctgggaccagcgttctgcttgccaaaaagtaaacggcgaggacttttaagaggcatgccggttaattgcatttgaggatgaacggcgccgctgtacattcttagcgactatattaatctgaacattataacatggcatgcttgaatgttatcattgagacctcataaccccgtttgctggctctttcaattcgaaatcgcagtcgagcttgcaattgtagtcgcgaactttctgcacttaaagatcacgtttaagagagctctttgaaaaggcttccagctacatcatagaagtattccatgcagatacttgcatcgatggcggcagcaagattacaagacaacgttaccattgaacattggtcttgtcggaatttcgcggttattgcaaggttgtttgtgtgtcgtggatccttcctgttttgattgctctgttgagaataaaaaagctgcgaatctatgttgcacaaatgtctattttgggttacaagatcggcaacgcaaattccgaatatttaacagatttgcatcttgggcacattctggggtacttctgtaaatattactcaacggctggttactgttccacacataccgaccagcagtcttatctagtacagccattgcgtcttttctaaggctctggttcagctctacagccctaggcattcgatttctttattcaatttctttattcaatctcttgttgaagtatagatagagataatatatataggatagcaagcctggatacctgacaatggacgccctagcctgggcaataaataattttgtcgcaatatcaaccttttcattagcaaaacgaagatagcatgatagtagctactatcagtaataaatagaaccagccacttaggctggtgaataacccccaactgcttacgagcagctataaaccgaagacgcagttctctataaatacgaagatgaagtgtgtgccaaagatgagaaactgctggccagccagactaaatgctcatctcagctctgttcaggtccgcgaatacatgttcaatgaagtaaataccactgtcttcaagttcacgaccttgcagctgacgtagtaaagcacgtcgataagaaacaataatacaatggggaagctaatgagtatcaccaagctgaaacagatgctggtgagaagcgactcaaggctgtgaatggttgcagcgagaaaattcgaccatatcataagctgcccgctgtacgaagacaccacgggactcgagttgtagcttattatgttggcaatcatgtctgtatggttatccgaatatgtgtagcgaagatgaatgttgtaatctatgactttgtgaatttgtaattagagaaaaatggaatctggaaaacgtttagtataggagtgagcaccttccaatgataagcaacgagatggagaatagcaacgaatgtattaacgatcacacccgatactcctttcacagacgagcctgtctagctgagtattataggtgataagtagaatgaagatccttgtgatgtgtaatccattttttcatggacttttcggaccatatatatattttgtaaaccgccccgtttaggccctgtctctgatatcatattctttgctttttgcgggccactacaaattaagaaaagtgtaagtgcaacctactccgaacctacagatattttttgagcctgtcctgggttacccggcgtgtcatcccgtattttctgcaccagctcgggaggatagaaggaagaaaaaatttccagcattgtttgcacaatttctgtttaagctgctctcttctttcctcggtcagaagacacttgcatctgcttatgtctgttggcaaatggtatgtaatctttctagtaactatacggagacagtattgcacacccgggcgacctatctgatgagcatctcaaattaaacttatctacattatttgatcgcagtgaaaaaatcttactattctgatttggttgttatctctaaatggatgtgtgtgcaagccagttctggctgtttccagtaatgtcaagtcttgaaactaatactaacacatagcaagcttttgcaaaccttaatgctttaagccttacatcccctgttttaggataaagggatgttaactctgactttgaacaatcccactaaattgcttgagtttcttctacttctttgtttttgttcactacaatctagaatgtgtaaaagacacatattaggcaaatgtggttgaatcctctaggccgattcgggtagagtcggtagttgtaactactgttgatcttatccctgtttctctcttttgttcttcatctggactccacgttgtccggcgcctcaattataattctctgcatcaagtctcaaccttatcgaagtccttcgaatgcggtgaactggtcgtttttcactataaatggtgccactcttgctaggcagacattgagcaaataatccgtgtagtagtaagcgtccgataatatgaattgcaaatagtatccacaagcgaaaccagggcacatgctcataatatgtaacacactatcttgctactccgaaaataacgcaggctatgtgtagattccgacattgccagttttggcatagctcggcttgcgtcagggagtgctgtcgccgattgctgaggcagtaatcgttttgttaccaactttaaatttgtaaaaaattctggccattgttaactctattttcagcctggattggaaatgcaagggatagctcggtaaacgtagataacaagtaatccaaacgtatccgctatctttgcaagttaaattcctggaacgccagcatggctcagtcagataagcccattgtccaatagacgtcttgaagagaaataaggggtatgctataggcagagagttgcagctgctgggttgaattttcggtcgcactaaattaatactgatccccagatgctcgaagtactttacaactaaaattattagacctttcttctgattctagtcgtcaattttgagcatcctagtcgcctttcttcgtctaattacgtcagttttggtagtattttataattgtcttttgatgaatttatttcagaaattaagaaaaaaagaaaatttgaaattagtttacttctaatgaagtgacattcttgtgtttctgtggtatctatttggactcatttacacaaacttggaaatagaactacttgaagtttactagacttacggcgatccctaaatacatctaataaatccaaatcgtacaaagactgttactctcaaatcgtattctctcaaatcgtattcatcaattttgccaggattactattttagtttcttaactatttacaatcgacatttatatttcatgtgaaaggtgacaagcatgatcaacttcttataataaactttgcaaattaaatggacgattgaagagcttatcatcgaattttgttctcaaagtagagtatgtgtaacaaagaggaagcttcttttggtttcaaaattgttccgccacttgttaaggtacaatctaactacaatggtttggggtatccttaaaaatcagtaaaaagggctactcgatcacatacaccacgttaagatagaatcgacctataagacaagtacagcctcttatgacaagcaatatgaagatcagagacatagtgaactatataattatccaagggattcttgtggcaatagcatagaatgtaatgtattgcgattaaagtcgaatttattaactacgtggtatataaatattcctcaatccacacttaaggatggaagatatcttaagataagaggcattttttgatatcacctattacctagatatccttagaaaactgtgagagcctatggcatcaagataccggacttgtagaaatggtgtctaaagaagacgtctagactgcacattcatttttctttttaacttttttacgatgatatagcacgtgatacttacataattgcaaaaaccatgaattttcgttgaaaagcaaaatgcctggctagctcaatagagcgtttctcttatgttagatatcaaatggttgcgggttacactcccccatagattgtaatatgcttcgatcatcatcgaaaagcaccgtatttttgttttgcttcagttaaggatagtctacggagtcaatagccgcactagcagtggatggggtttgaactatatcgcactgaaatgactgattgcaaaaaagagtcagaatatggtcacatgactagatctaatttttcatggagtacaattttttatgttgattaagggtgaaatcgcttgaattgtagccgaatattgtctgtatttactacgaatttggaatattggcgttgcaaatggcatacggcgtcaaggtgaataatgtcttcgcaaaggcagaagaaagcagcgaatccgtacaagtccaagagcgcgctggaaacttttcctcatcctctctacctgaagagaacaagcagaacgatgtcgtagtacaacaacaagaagaagaagaaaaagactccaacagcatatgggcctacttggcaaatgcctcgaagaagttggactcgttaggagtagaaactagaggtatcgagagaatacagccatacgaaaggtctaccaataagactaaacaacttatctctgtcataggactttggctttctgcctgtggtgggttgagttcgatgtcttctttctatttaggcccgcttttgtttgaattgggtttgaaaaagactttggtgtctggtttaattggtcaaggacttggttgtgccattgctgcctactgttcattgatgggacccagatctggatgtcgtcaaatggtgggagccagatttcttttcggttggtggttcgtcaagcttgtttcacttgtcagtatcattggagtcatgggttggtctgttgtgaactgtgttgtaggtggtcaaatcttggccagtatcagtgacggaaagattcctcttgtggtaggtattgtcataattgctgtcatctctcttgcagtggctattggtggtatcaagcagttgttgaaggtggaaactcttcttgcacttccagtaaactttgccttcttgcttttgtacgttgtagcctccaagaagttttcttatcttaccatgaacgatcctatagacgaccatgctactcttaagggtaattggttgtctttcttttctttatgttattccattacttctacttggggttccattgcttctgattactacattttgttccctgaaaacacacccgatttgcatgttttcagtatcaccttctttggcattcttattcccacaacttttgtaggtgttgctggtcttctcatcggtaatgttgctttgacttatgagccatggggcgatgcttatgctgaattcggtatgggtggtttgttgaacgaagccttcaagccatggggaggaggaggaaaattcttgttgattcttatcttcctctcgttgatttccaacaatatcttgaacacttactcagctgcctttggaattcaattggctggacgtgttctttcccgtattcctcgttggctctgggcctttgtgatcacggcggtgtatttggtctgtgcccttgtagggagatacaaatttgctacgattttgggtaacttcttgcctatggtcgggtactggatatccatgtatttcataatattgcttgaagaaaatatcatctttagaacagacgctttcaagcacttatttaccaaagaattcccgccagagtctgaagaaactgaaggtacatctagaaccatagtgatggctaagaacagtgctaagaaccaacactacaactttgaaatttggaacgactacgacagattgacacatggctttgctgctacagcctctttcattgtaggagctgctggagctgctgtggggatgtcacagacatactggattggacctgtggctttggctatgggcggtgcgtacggaggagatatagccatgtggttatgtatgggattcagcggagtagcatacccaggattaaggtacctcgagttgaagaaatatggacgttagagacattaaagatatacattagagtaatatagatttatacattagacttttcagtagtttcgtagcaatgagtacatgtcctgacaaatgttaaacgagacattcaaacatagaatggacctcatttacgagttgctagcaggtctgtgggaatcgaacaacgacttttgaaatgaacaatacactgagaaaatcatgtcagttttggaacttgggatctaagcaggagcgtctaggtcggttggaggtgatggcatggtcaagtattgacgtgctctaagctcaaaatcaatgtgagtctgtaatggaggttgcttgaaagattgatcggtcgcatatatattacgtactagataaatccttcagagcaaacgacttataaatcagatatgtcgacatgatattccaattggggtttaagttcattggagtacatggactctgctaccgggcagtttctaagtacactatagataatatatcaatggcagaatatggggtaagattttgggtgcgaacttgggtgcaaccatagtcacggtgctcgcaccaaatgtggctggacaaaaaatactgtcaaatataaaagtactcatacctgtcgtgttcttaggcaatgtaggaaacgggcatatggtgtaacagggttaaaggacacgtacaaggacaaggacgcggaaacggaatcggaaacggaatcagactcggtgtttattcaatacagatatgggagcttcgggtgtgagtggtatcacgtgagaactaaaaatgcatgatgggtgatggcaaatttttgtttaatctcgagatagcgggtaatattttttcgcaatgcgtctaacttcaagatcgaaaaggttctacctggtatatacaggatattgaacaccccctttaacctcagtggtagtacaaataaaagcggatatctcttccatcgcccactatcaatgacatatacagattattgtaaataaccagctgtactggaatctttattgttagtgcataaccataatattatgattttgggagacctgcgatcaacagacgtcagaaccggtggttccagactatgctctcagcatgtagaaacaaaagggagtatgcaagattgttgatgcgatcaggttcgccttagtaactccgtaaatagcgagattttacatcatgaccttacttgcaagcgtatttcatgtcttcgtatctcaatcctaaacagacagactttgtactcctatttccttgttcagaaaagcggaattcgtggatcctacttgacccaatgtggaagaggtgtgtataggaaattatcacgatattctaccactaaagaagcagatggtgtctgaaggcgcagcattttgttaacacgagggtcaagagttgaaagccgtatcaatttttctgtttcatctacttccaatatgtcagagttagctaacccgtgctcgcagcacagatccttgtctgctagcccacctggtccagacttcctttgcttcactctatttctatattaagcttgactataagcctacgtatttctcatgcagggctgttccagctcaatgagtcattcggttcggattttacttaattatattctgtacatggtgtttgtgtttgcatttggagagatgatcgtggtttattggctgttaccccggcaccggtgtcaacaccgattctagtttataacggccacctccgcatttgttagcttgtgtaagcttagctgtgcagacctgtgtagtgatatttttttagatgctaattgtctctcctcctttggaaactaagctcgtatttgatctagtgcataccttcaactgcttgctgcccacctttacgactcctgcttagttattatggaactagagatgaaaaattttcccaaaacaatgataattccttttctattcggggttacgctagaatctgactattaatatatataggtaatcatagtatgtagtgaatctttaacttttcaattttcactatttttcattattcagagcaactaaattagcaattgactttccaatgctactgactctacctcttcagctggctcactccagccatgcccacctgagacatatacggacacgtttctcatctaatgcatcgtgtttcagcaattccagtgccccagatttggctcttcccactgaaccagagtctataatcccttcctacaattgtcttgtagccccaggcgcgtatttatcgttaccgtcgtctcgtagatcatcggctttctcgagctccgacgccctgcctgatgccaacgttaacctccatctccaccatatggatatggagtctgcgtctcttgctcctgcaccattatcaccaaatcacgcacacttacaaaatgagaaccaaaatgaagttggctgcgaggccggtttcggggatttcaacatgtatgactgcgcggattgcactgctgcgaatgccaacttgcgtcgccgttcgtcatttgaatccatagttgatgatataaacaaattgtatgacttgactagtaccttcaatcccatttccgatgctatcaccatgtcggtgcatatcagttctgatggcgaagaacatcaccaaggtctggtagtcacggggtacatgataattgagaataggggtgccgagcctattcccttcgaaatgtactacgtcaccttggagggctcatctaccgtacttgaaacaagatacactaagtacaggaagagaaagcagcctttgcacgagcagagattcttggaaatgattgacttcactggctcctacaatcctaacctctttgattcagacttgtttgctggttctggatctgtattgttgccaggcacaacatataccactcccttttggttcagaatcccccatcagcttgtggaatcagcctgccagcacaatccttccactagccattgtcaattgcctcctagttttggaatcccgttaggatccaagactgacgtcaacgaccacgcctatacggacacttccataagttacagagtagttggccgttttataggcagaaaacaggactatggagctactgattcagtcgacgatttggttaccttaaaactggctctaggctacattagagtagtgggccagtataaaactccacccaatgtcaagaattcactgatggttaaaccttatttcgatttgatgagcaatcttcgtcagaaagtcgaagaaggcaaggaaatgaagcggatccgggctaaaaaggagcaggctccacctccatatttgagagacgagcctaagaccacaaaaatggcgtacagtccagtttaccgatacaacgacccttctcccgattattcagtgtatgctgataatagtgaatacgtcttgaagctcactaagagaggttttgctggcgaaaagactgttggatctataggtgtttatgctcccaacaccgaagtggttgtcaaatacattccacctcaacaattcagaaatctgcctgtcaactcaaaagatctagacacttggacattgaagattcctgtcactcttgacgtccaacaatgtggagactccaaaccacagatcagatctattcgcaccgagttggtgatgatgtctttgagatctgacgaatgtgctattccttttgaaattgactacgatttgattcttggaaaagatagaattaccagtcgtgattgtgacgaagaccgttcttacaaacacatcatcaggcccatgaaagacgttgccacccaattgtacaaactcagcaaggagattggtaccgaaactttgcaggtggagaagagtgcagccattgatttgagaagtgtatgtaaattaaaggaaaaatgcaccgttgtgactgtgcaagatgttaaagttgacactggcagtgatttgtttaacgccaccaacgggtccaagttaagtacgtggcagagcaagaaaaccgagaagtcgaatcgccagttcaatttgttggttaaccttgcatctacaagtgagcttaagaaaagcaagactggaggctacgacgaacattgtttagttccaactttccagtcttgtcacttttccagactctactatgtgcggatctgcttggaattcagttaccacaacgagcagtacgcttacatcaaagtaccagttattgtggagaacagctaaaaaaaatttctaaaagttctaaagtaatttattatttgtttgggtatatagaagtaattaggttcaaaatgggtagtcatcgatattggggatggctcattgggtttagaaattacaattgtagcaagtcacaatggtggcccagaagattggttgtattctatgcctacggattgacttccattcacttaaacgcctaaaattagacgcctacggtagccgccctcagttagacgacttcgtatgcacgcgtgcaaaaaataagcttatctacaaatgactacacagcgctagcagctggtgccactgccaagatgatttatgtatgcttgtggtttctaagcgggatgaatcatacattattgcaggttaggctttcgctggccgtatcgaacgtttcagaacaagaggttgcagccactaccctgtgtggcaaaatgcaggttatgtcgacaactgtttttgtgatctgatcgggcaggttccgctcttatttgttgtatgcacgctatcgaagaggaaagaaggtttttaagcactgagtcatagcagagctgggcaagtacaatatacacacattttagcgaataagccatatttcctcgtagtacgtagtaagagaaagtggcaatagcggggaatccaatccaacccaatctctatttcttgactttgtacttttccgagaaaatttctattgcggttacgactcattggcgttagtcgtgtggagccatatctgcaatatgtacattgttgctctcaatttccccgtcttaaattagcagttgtgaaaaaaatgtgcaattctgtggattcagtgaccgactttcagtttacactgttagcgtatttctaggcactgacatggggatcaggtccaagaacagccaatcagctattcgaaaccaacattttcggatagcgcaaccgaaggtcagacgactcctcttctactaaagctcatagtaatttgtcatcttatcgcagtcgcagattacgagaaaattccacccattcttgcacgattattaatcacgtcttattaaacaaattcacctgagccgcccgtagaaaaaaagtccagtcggtagcaaggacccgctcggagattacagacaacgtcttactgtatgcttagcctaattagtcattatccgtcttacaaaactctaattctgactcctttgccgtgtgctactctaaaattgttgtataaagagtcgcagatctggggcagattttcttaaaacagcccagcatctactttttgacgatctcgtaacttcttggtagatatatattcatgggcacttgcatttattcataatcatagactctcctattcgtacaagcacacaagtaatcatacttactaattcataatcatatactaatttttatcataaactaattcgttatcctaattcattatcatatactaattcacaagtatcaagagactacttgatacagtcataatcaaatcgcttctattccttttactcatctgctcacagtagagtaatctgccagtcaattagacctatatctctaatatcataatgtccaaagaagagctaaaagacttgaactctgaaacccaaagctcagagggtatggaccagttatggtccattcttccatcgtaccaaatgtatacgaacaccgtctccaaacaattaaacgtaaccgaagatgaaagcatcgagcctccagcctaccagaactcgtctacgtcctctattgtttctactggatccaacgactctcctatgacatctatcatgtcccctcctggaaatgctactatttctacaagaagcaacagcgactccacccttaatggaggaattattgttgccgaaggccattcgtggcaggaaacgattttggataatgttcatacgttaccaaatttgtccgagactgataacaagacggctcaggccatagaaatgagcattcacttcaccaaggatattgtggaagtaggcaaggaacctgtagaaatcgatcctctgttatgcgaatacgctcagggtgactttatcaatggatatgttactataaaatcgaacgccaaaaaacccattcctttcgaaatgttctatgtactatttgaaggaaacattatcatctctaatattcagaacaaagaggataagaagcctgtcagagtcaagaaattcttggaaatgtttgatttcagtgcatctttcaacgatggtaatatcaacaggttaataacagatttctataacccattcacgtgtcccgacttagtggatcctagcgatggatcacgtttgtcgtttggtcccgataagcttatcagaccaaatcatagctacaagagatttttcactttcaagattcccaacaacctccttgactcagaatgcaacgatcacaacctaagcacccatgtagaattgccaccttctatgggaacttccaaataccagtgtttccagtcagagactggcgctaataggatcaaagatttctccatgattgaaacttccgttgcctatggagttttagccagattcatcggtagaaagtccaagtatgatgttgataagacatttgaagctaataatagcaccaagattataaacgctactggtgacgagtatatgattttaaaggaaaaagctggtctcatgcgacttgtcaagaaatccactagaatgacagaaaacgaattaaagatgaagaagttggaaacaaagatcataagacagagtttatataacagaattaaagaaaaaattgaattgggaaaggaattgcttaagaccatcgagacaggagactacgatggttcagtggacatttccaggaagatatcagaaagtgaattgcagttggctaagtgtaagcaacagtatcgtgctcttcctagagacgttaaatttcctcaaatgcaagtggtggagaattacgaagtgttggcgcctttgacgaagaagtcgtttacaggcggtagcaaaatcattggcacattgagtttgacaactccaaaggtaactcatttcatcgactacatcagccctgtaaagttcagatgttgtcaagaagtgagccaagaactcacggactcatggcggttgaaggttcctcttgatttttctgtaattttgccttccattagtggcattgacccaaagaaattgcctgaaataaaggctattttagtggatttggccgccattacagttcaaactgagaaatatccaattccgtttgaatttgaccacgatgcaatctacaacagtccccagaccccaaataccttggagaagatgtcagtaattgacactgacaacatcaccaacaacattgtcaaaccaattcaggagcaatctgttgaattatacaacctcatcaaaactttaggttctgacaactttaaggtagatctccaattaatcaacgatatcaaatcgctttgtcaattacgagagaaatccattaacttgaatgtccccgacttgaaggttgtacaaaatggaaaactcgtagaagccgaaccgaagtctctcttagcaattccttggaaacttgacagcaagataaatggtttcaagaagagttttgacttggagatcaatttggcctctgcttcattgaagggtgtgaaagaaccagtcggtgccaaggcttacgacaaatactgtttggttccaaactttcaatcttgctatatggccagaatgtaccaaattaaggtaatgttggtgttgaccaacaacgaacttgtgaggataaagattccagtcgtggttcagaaataaagtcagtatcattccggcaatggtaaaatatgtacatagtataattcagaatagagatacctatagaaacatatgcctatttgatgtataataataaaattatattctaactggcacaactgcattgtagcatggaataatcttctcctttgtctccctgaagcaaccatgattgttccaactctttcaagtcatcaccccatttagtggaatcaaatggatagaaactcatcctctctaactttttcaagtaggacaagtcgtaagcacccgaatcttgaacatgggcaataacctggtcgagaatccagttgcggggcaagaacacaggattatacttcttgctttctaagcgggagaaggtaggatctattgcccgagactcttccaaatgtgcacggtatacccctaaccagcttttaatttcatcggtcaattcctttttagagtatctgttatcattctcgtcataagaaggagccaaaatattatcggcaattgcgtcggggttatagttctcagcatcaaatttctggtcctgcaatattaagaaaaacttattgtagtcacatttgactttgtatagcacttcaagcaagggtgcaatcaactcgacgttgtgcttatcaatatttgtgtagtctattatctttggcgatatacccaaacgggcaaagaaagtttccacatacttcttggtaaatgcgtattggtatacatctccacctatttctattattttagtagctctcttgataattgcatcttcccaatccttatctatttcgcctctttcaaatttaggatcagataacaatttggaaccggcacctatcaattcagccaagtcttcacctaatctggttaagttccaccagattgccgtaggagtattacggtacccgtatctctgttcgtggtcttctgaattgggagtgtacgttggactgtacttgtccatgatagagaaaggaccaaagtccattgtcaagccaagaatagaagtattatcagtattcaagactccattcaagaacccataggattgtgtgagagccgtggtagtggcatttctcactatagtttcgtaatacattttatcgtagtcagttagttcaccgagtgattcggtagtgttatcaaagaagtcagacttttccctgagaaggttttcaaagttgcagaatttagtaccctctacagtgaagagctcatcaatgacataatcactcaacttccttataccacttctatcgcccctccatctgtaaagatcgaacgtgcccaacctgatccacagctcagcgaatctagacacaatggcacatttctcggcagcatgtctctgggcgtaagtagcaggaagatacgtgagcgacaaagctctggtggttgggattccaatggcattcaagtgctcagagattatgtattcacgaatagaagacctgagaacagcctttccgtcagcaaatctcgagtacggagtcttaccagagcccttcaattgcacttcatacttgtgcctattatttgactgcacttttgctttcggcacttcaaagaggttcaccactcttccgtcgcccaattgtccagcgaattgaccaaattgccagccagcatatgcctgggagtatggaaatggataacctttatcttgaaacgtatctttgtacattaggtagaattctccgctgactaattcttggaactctttatcgttgacttgttccggatcaagtccaagatcgttcaaggccgcttcgttagcagtcaagaatcgatactcctttctcaactcgggcaacgaataggaaaatcctcctgacgagagtattcttggtttattgataatgccatcttcattcttcgcagctacttccgtagaggcgatcttcccatctggttctatatagcttgaaaaagacgaagtctttggcaattccgataatttactcatggtgtgtgatcttctgaacgatatcaacgagtttctaaaactacgcagaacaattctcagcattgagaggaattccgctgactttttagtaagaagattaagtcttgataagtgaggctagtggccaggactgaaaaatagcctgcgctaaaaaataggtgtttagcgcagttccgaaacacggggtgatggctgcgaaaggacttaagaataagaagtatagatgaagatatgggcattgcaattaaggtcttagctaaacgtatttgtttatattgcatgtagatataagaggaaagcacaaactattcggttacgacatggtgtatagtagtagaatgaaacaaaatggctttcaatattgagttttcttgtagtgaaaatacgaaaaagagtattatgctaatctgactactctttttcgattatcttgtagacatactctattgtctccctaatgctactctccggaagggtggtcccagtccacaactccagctgggcaagaccctggtagatcatggcttcgatgcctgaaatcactttccaaccactagcctcgaactccttgaaaagtcttgtggatggcttgggatggtagcacatctcaagaatagtgcctttcgtcttcgactctagaaaaacttgtattgtttttctggccaaaagctcttcctcagtaatgggtgcaaaatccggaacggtgctcactataagcaatggcgattccacggcttgtgccagttctgggctctctatatggacaattttaccttggaaacctgccagaaccattgattcgcgtaccgcttccacttccagagcaaatctgttgaccacatatatagtggagcagtggaaatattcgtgcaaagcatatattgctgaacggcatgcacctcctccaccatacaccaatccgggttttgctagtttcttcgatgtggccacaatacctttggcatttagtaagaatgaatctctgatgcctattgtatctgtattagtaccaatgtataatttgttcccatcgttgtcgtttcgcaagtagattgtattgatggctcctactactctggcagattcgtccacagtattcaccttatcgaacatcctgaccttgttgggcattgtaacagctgcgccagcacagctttcagagtacaagaaccgttcgaactcgggaatatcactgctgtccaacaagccatacctccaattgaagcccaacttggagaagacgtagttgaggagcaacggggccctggagtgctggatggattcgccaaataatttgatctccaagggttcggaccgtttcacatccgtggatagcgtcattctattatgactatctatatatcaggtgtatgtctatttataactacttaaacaatctgatcgccgatcgatttattcttgaattgatgttgtcgatctttctgatttttaccttcttcattcatagatagacccatggagctcttcgttcactctcgtgtctatatacattaacatcaacgaccacaaccataaaatctactcctttgtctctcctccacgtcaaaaaaacccttacacaaacaccaagattcacgcctatttattcgtgcgacatgttgacgcgaccactagcagattcgtgtaggtgttacaattaattttcagtcttcactcaaaacgataacgttacttcattttcacttgttttatatctatacatacctagcatatacataacctacccatataaccagttatgtcattgctcaaggtcctctttaaacagaggttgaagttggtggcagccatagtgatactattgctcttttcccagttgggtggccgtggaagaaagtcgcagaccatccccaacttacaagccggctcaggctcagacactatacctaacgggtatcctatagatgttgcagcaattgaaaaggaccggaagaaacccaagatccacgggtttgatccagaagaagtcgtagccagtggaaagctttctgcagactccatcatcagatccatcagagactacacagtattcttcaacaacatggagagttatgcccctggcggacactcgttgaaagacaaatacaaagaaggcggaaaggccaaggagttgttttccaaccacgattcgttcttattctccaaagagtacttggaaaatgtgttggacgtctcaaacgacatgaaagacagattgctgaattcgcacaagaactatgtcgacgtacagatgaagaaattgatagaggtatacggcttggacacatttggcaacattttgaaaacagacaccgagtgggacgactaccacggcagttctggctatgtattggtaggaggtggaaagtacagtttcttgtcgtatcttgtaatcagacaaatccgagctactggagctaagaaaccaatcgagttgttcattccaagtaagttagaatacgaaaaggctttctgtgagacgattttgcctaagtataatgccagatgtaacgtattcgatacgaagttggctggtaacctcaagaaatctttcaatcttggaggttaccagtacaagatgttggctcttatgagctcctccttcgaaagggtaatgtatattgactctgacaacttccctactagaaacatggattatttattcgactcggagttgttcaacgagaaggggttgatcttgtggcccgatgcttgggcaagaacgactaatcctgtcttctacgaaatagccggaatcaaagtcaaggagaacaagctcagatactccacctacgataagaaacaagccgaaaaggaaggaaagccattaaagccattgtctgaatttagtttcaaagactcatggttccacgatttcgagggagcacttccggatccaacttcggaaacaggcatgcttttgattaatagaacgtcccatctcaagacattactcttggccttatactacaatgtttatggaccattctactactatcccttgttgacacagggttctgcaggagaaggtgataaagagacgtttattgcggcagccactgccatgcagcagacatatttccaaacattgaaacaattcaaatggactggctatgtttcacaaaatgataacaaattcacttcgaaggctttggcgcactatgatcccattcaatcacaggatacgtcgaaagatgacattgatatcgtcttcatgcatttgtcgtatcctaagtactatcctaactggcttgtggataaccatgacttggtctatcgtgaaagtggcgaccatattagaatgtacgagtcgatctatgagaacgttggctacgattttgatttgcgcgtgttacaattcttcactcaggctatttgtcccaactactacgattctcaaacatcgaaggccgtggatggagaagatattgatatgatggaagaatacatgggtgactacctagcttatgtagacgatgacgaagagcacaacatcaacagatgtaaggatgttttcattcctcacttgcaatggttgaaggaaaccaccaagttcaaagaagggctggtgatagtatagttacaataaagagacctactcatatataatgtcataaattaatcgctcccttacaattgacttttgcatcgctttttaattataatgaatgtagttccacagcagttaatgtagaatagtgaacaggaaaagattcagtggaatttcagaactcttcccagggtaccaaacaagatctacctaaatgattttgccatcacattattctcactccattaaacggcatcggaaagtagtgatgcacataaaagcaacctgaaatggtgtcgaatgtagcttcctttcatcactgtcgtaagtacgaactcgcattcagagaaactaaaggaagccaaatttgtatatttgcgctccgggccggaagaagacggattcggatcgctactctttccaaattttagtacaaaaagagcaacttggaactatcggtggaaaaatacttacggggttctgatccatttattcggcacctgaaagatgacccagccttctcatctatagcggcatgtaatatatattaacctttctgcccgcacttcaaggactttatttcgtttcttgtcggtgtatgtatctacaacaaatgcaatcgtcagatactgtgtctactttgagtgctgaatcagtagatcttgtggccagccgcatgtccaaggaagtgttgcaaaatgtagaaataggtgaagaagaaaacggaaaaggtgttcttagaaacactgtcaatgttcctgaaactgaaaccgaaaccgaaatcagaatcaatcatgataggactatgttggccgaaccgaattaccaggatatctcgttgtcgagggaaatcgggttcatggttcttatgtgtttgtcccaattacttacccaagctgccgtgtcacaaaccatgatttccgctgattacattgcacccacatttggagttagtggtagcccaggtgaaatttcgtggttttctgcttccttttcattgaccgtggggacatttattcttatatctggcaggctcggcgacatgtatggatacaagttgttgtacatcgtaggctacatttggttcgctgtattttcgttggctaccgggtttgccggatttggctcgtcaagcgtattgttcaacgtcatgagagctttgcaaggaattggcccagctatcatgatgcccaactcccaagctttgatcagtagcttttaccccaacaccttcagaaaatcaatctgtatgtgtttattcggtgctgtagctccaagtggtttcactttaggtgccttcttcagtgccatctttgcccagttctcgtggtggccctggactttctgggtttgtggaattgtcagtttctttgttgccatatgtgcttacttcgttattccaaataagatcgggaccaggtcgagtgtttcttttgacttttatggttctactgctggagttgcaggtatggtgttaattaactttgcctggaatcaaggtcctgtagttggttgggacaagccatatgtgtatctgatgttaattgttggtatcttctgtatcattggattcctctttattgaaaagaaagtcaaagatccattaatttcacaggaagtattgaagggcgaaactggagctgttttatgttgtattgcagctggttggtctacgtttggaatctggttgttctattacttcagatggtcaatgcttgttgatggtgacacgcccattctttccgttactaagagtttagttgttatctttccaggcttcattgctgctctttcgactggatacttggtacatagaataccttcttctttcatattgcttatagcaatgcttgcctttttcacaggtattgtattgatgggcaccagacctgttggtcagatctactggtctcagaagttcgtgagtctaattatcgagccattcggtatggacatgtccttcccagctgcatgtatcattctcagtggagccttgccagccgcacaacagggtatggcaggttctttagtttcaacatttgtgaactattccatttcaattggtttgggcatagctggaacggttgaatattacgttaccaagaatatggaaccttcgctagatactacagtctacggcatgcggcgtgccttccaaatgggttatggtttggccggacttggagtcttgatagcttgctctttcgtgtacattcaacttgtacaaagaagaaaggaagcaaaccaagagagtgtaggaaagaacctgcttggctgatgtgcaatacttacaaactacgcattacaaactcatcacattgcatatttatttaattattatagactgataaactaataccaaactgtcattattgaacacttgctcagaagaaatggttgtgaaaagtattccgaatcgggaggtcgcactgtggcttccaattagtaaggactaaatcgtaccgtacatatattctcttctctaaaattacaattgctcagacatctacgacactcttctttttacaattcagtttagaaagtgctcgtagctcgttactaacaagcataatagaccaagcacgctatggccgtttctcctgtattaaaatcgccgttatccaagtcgttgaaagtcgcacttatccagttgaaagctggagctgataagagtgctaacttggccaaagtaacgaaattcatagatgaagccattgctacttctaccattggttccttggacttggtgatgttgccagaatgtttcaactcgccatatgccgtggaccagttcagaaactacgctgagttgatcccttctggggagactacttccgtattgtctgagttggctaagaaacataaggtgtacatcattggagggtccattccggaattggaccccgaagcaggcaacaagatctttaacacttcgttaacttttgcaccaagtggagacatcattgccaagcatcgtaaggcccatttatttgacattgacatccctggaggaatcacctttcaagagtctgtgaccttgacgggaggagacaaggctactgtcttcaagttgggagatttcggtaacgtaggtttgggtatctgctacgatatccggttccctgaattggctcaaattgcatctcgtagtcctcacaactcgtttgccatgttttacccaggagctttcaacactaccacgggccctttacactggcatttgcttgcaagatccagagctgtggacaacgagttatataccgtgttatgtagtcctgctagagacgtagagggcggaggctaccaagcttacgggcattccttggtggtggacccttatggaaaagtcattgctgaagctggtgaaggtgaagaaatcgtttttgctgaattagataaggaacttattcccaaagccagagaaggcattccagttcattatcaaagaagatttgatatctacgaagacttcgtaggcaaaggaaatgccaaggtcagcgatttatagaatgtctataattgtgtatatctatatatatatgtacatgattaaatctcttcgtcttcctttctctctatgaattcaaccaacacctccatgaatgcctttggattctcactgatcaaccaatggccagcttccacgtctctaacctcgaagtctgggaaatactttccgatgtcaggaatcacttcgtccggaacatatggtgagttggtacctctgacaaacaatgctggtcctccagtccacctgacaatattcagatcatagggccagctggcaatgtttccggcagtaatagctttaccgataacatcaagaggcaccttagaggtgattacatcttcctttcttcctcttttaacattggtaagcaaaaattgacgcacggtctggttagattcgacttgggccaagagcttgtcaagatccttaatgtctgtgtacttgtatttttccaaaccaagtcgaagttggttgacgtatttgccaaacgatccagtagagtcgttaccagaaaccatcacgggtgaattgtctactgctacaatcatcctgggcaaatctggacgacgaagtgctacagccatagaagttttggctccaagagaatggcccaccaagatgggtttggcaaaatcgggaaatttctgatctacaatgaacttttctacatcagcagctaatgaagggtaatccaatctgctgatatgaggcgattcaccaaagttacgcaagtcaagacagtagacgtccctgtctaaagtcacagctagctgtttagcaacagtcctattatttgatctagaaccaaataacccatgcaagaatatcaaaggcgatttgaaaatggctggttcgtgtggtggagagtgtttatcgaatttcaaatccaccgtctctatagttccgtctatagccaaagagtctccaagatattgagggtcaacatgggcataggatgtgctacgtacaaccgaagcagatgaaaatgaagcacgatttaaaaagactcgagggatagctctcagcgataaaatcgttttggttccaaacatggagtaactcaaacagcatgccatggtggaaagcaatgaagtgaatgacagtgaagaaacagaggtctactaagatatgagaattcgcatttttcaatgtacctctggaaccaaaaaagtcagattttgcaatcatcaactgcaatatgagagagtataatatgtaaccattaaaccctaaaaggaagaaataggataattatgtgattctgtttctctaaattgttatatattcattgtgtctttggtacaaatatatcaatgtgtgtttgtatttgagtaattttgcaatatatctgtaaattccatgaaaaattatactgaagaagattacgaggagatacgtatctgttttagagagtattaagcaaacgtcgatatcattctacgggaacttaatttgttggtttcctttagttggaaatgcttgcttctacgctaccagccgtgggctacgaaaccaatattgtggatcccccacaaatattcgcacaaaaaacgttttgatgtcagtggagagagtttgggggaacattctgtcaacttgcataatgcaaaacgaagttcttccgagaacccaccgggtattttatgggcatacccttttttcacgatttttacatcaattggcacccctacaagtggaaccacctatcttattctactcttatctaacaatgcctgctacaaagtaagtaccgtagattatagtagttgctcctcggaatttttcacttgattcatgtactaatttctcatttagagccaccaaagtttttcaacttaacgacgaaacctccatcccaggcgtaggtcttggaacatggcagtctaccaatgacgaagtgtacaatgcagtcttaacagcattgagatatggttacagacatattgatactgctgcagcctacggcaatgaaagtgtcatcggtagagccatcaaagactccggtattccacgtgaagaattatacatcaccacaaagttgtggtgtaccaaacatgacaaccctgaggctgctcttgacgaatctttgtccaacttgggattggactatgtggatttgtacttgatccattggccagttttcttgaatcctaatggtaacgatcccaagttccctactttgcccaacggtaaacgtgacattgtcaccgactggaattttgtaaagacttacgaattacttcaaccattggttgcattgggaaagaccaagtcaattggagtctcgaacttttctgtgaccaacttggaaaagctcttgaatgctccaaccaccaagattgttccagtcgtcaaccaggtcgaattgcacccatacttgccccagcaacagttgttggaatacaccaagaagcatggtattgtgttggaagcgtactctccattgggatctaccaactcacctcttttcaaggacgaaaccgtagtcaagattgccgaaaagaatggagtctctccagcaaccatcttgatctcgtgggctctatggagaggaactgtagttttgcccaagtctgttactgagtcaagggtccaaagtaacttcgaagtcatcaacttgagcgacgaagacggccagacaattgacaacatccacaaggtcaaaggagttcacagattcatcaatcctaactgggatcctgtcgttgtctttgacgcggattccaagttgtagaccagatacaagttaaagtagtagaaccacaagtaaaatggttaagaaacggatatacatttataatagtctgaatagaaataaatagaaagaacgtaagcacggagcttgaagctaaagatacaggaggtgaacaatttgcaagaaaatacgagagatagtagctatctactgatccaacaatttcacgtagttggatggacagatcccgacctgcccgttggatcttctggcctgccaccacttgccgtctatgtcatcgacctccaagacctcatccttgataaaggagatttcgtttatgtcgtctggattggcatcgtagctgtacaaggccttggctttatatctaaaagttattcctacgtgattcgaagcttgatcactaaacacgccgttcttcactggattactggctgtgacattgttgttattgttggtcaagtctcttgattgtcttgactgtctaacatctgagctggagaagttttccaagccgttgagttgagacgacgacatgtacttgttggtagtcaactgggactgtcttacgttgtttccttcgaactgggcattggtttgagaacgaggcatgacagggttgacgtactttctgtattcttcatcttcttcctcagtttcctctaatctgttggcaccacgagacgaagagatatggccgtggttatggttgtgagatttgagggaaaacgagtcgatgaactggttggtgggcgattctggatggcctccaaaatataagatccaaatcaagttgaggatcgacaacaagatgcagccggcagcacaggccaagttcccggagctattggagttgtagatgacctgattgatggtattggtggtgtatacaaaggcaactgaaaccaaaccgaccaaggtaaacttgtatagttcgatgttgttgttcaagtacaagaagaacaccaccacgatgatgaggatctggtacactatcccccaccacgagaaacgggggaacttagattggttagaggcagcagcaccagcaagagctacaatccacgatatgaccccgtacgagatggttgtgatcgcaaacgggtcgctagtgaagttggacaaggacataggcattttgtgaggggctacgttgatcttctgacgtggaataggtgttgaaaatggttggtgttaaggaaaaattgagatcgcgggatatatcgacaagaaaattgaatgattttgatatttcggcccgttcttcgacttttttgtttttcaggttgttgtcagtgatgtgctgattaagttttgatgcttatggtatacaccagtcagcgtaacggtgtgatatggcagaaagatggagaagaagtaaacacaacaaagaaaaaaaacttgatcagatttgagaatgaaataaattttctatgcgggacccttagcgatcagccactaaaccacaacgaggtgagtaacgatagtatgtttgagaaaaaaaaactaaaaaagaactggaaaagatgcttgtagcagtgcttgtagctttgtctaggtatggatggcgtatcgaagtgatgatctgatggcagacctgattctacttttgaaccaattacaatgtatgagcaccagaggtgaactgaaaaaaagcacaaagaccaagcattaagaaggagccaacaaaacgaacaaagtactgctcttcgcgcagcgtctattggagattataagcaaatctccactggtggcagcggcagctgtgcgtttattggacttaagacctcccaacagcccagagaggaaattcctgccttagcatcaagaacagggtgaaacactacagctccaacaatagctaagtgtctggccagatcaggacagtttttcacgttggagctttgccaacccaagcgcacaatgagaaggtagagagctgcagatatacggccgtaccgaaacgctaactctctgttctacaatctactgggcttgccataccaggtgattctacactacaatatccaccacaacaataattctatatagattattaaatcaactaacagggcttaatacgcctaatgccccgtaactcccgtggggccaccgacgcggtagcatttgcaacgaaggaggtgagctgagtccctcgaggaaccagaaacgaggtgcaattcaaaacggatggcacacagtcccatactgagccgttctgggccaatccagaggctgctagacacagctactgtatcgggctatagtctaccatcttctaatctacatcagcattagcattagcatcagcattagcttctagactaaagaagagcccctgatgtcggacctgaaacgaaacggttaaagtggtttttcaacatctgcgtttttccaatttttatgggatgagaatttgatccggaccgtctccaagtcgtgtttcttgcgcccattgtttatctcatattgttgttgtatttgtggtacgtcgcgtacaataaagagcattcctggtctagactgttgtggacacgatcgcaatcctccagctgaaacaatcagaagcaattgcatcaggtgtcgagtcagctgacctcttccaactaatttcagcggcccttggttctgttctcctgataaggacattttttgcatagacgtttcatctcatctcccgaagcagcaacttctctagatagtggtgaggcggtcgtctcaggagttctggctcgtctttacgtcttcgcatctcatcttttcgtctttaagttcctgaccctcgtactttcgtacttcgcacatttcccctaatacgaatggcgatcattacgtaatattctgccatcccaaattgctctggatcgctgcgaggctgaaacggaaagtcatcatccgttgatccttgtgtcctttcgttgtctacgcccaatcttttgcaatcggacattaaccatcgaagtcatgcatatgttccattctgtcaatacaaatttgattcacgaagcaaaaccggtgcacctcccgacaacttccgcacagagcggaaaaacaatctgctcaaactagctggaacactttcccaaacggggtttgagaacagaactggaaactggagtcatggattagattacgctgtacggccattggtcaaaatggcagacgagccagcgctcaactgatgtaaagaggaagaactcggaaacggaatatggcttccatgctctgaatgaaactccgtattccctagctaatacccgcaccccagccgtatggctgtaccagtgactccgagacatctgcttgtagagtaagcgatttcaccaaaaagtcgaattgaaaacgaatccaactatcagtccatatttctctaccggtctttccatgaagacatctgagttactgttacactcgacaagctacactctactaaatggctgttccaaaaaagccccttcagatggaagtatggccgcggaatcaatggtatataaataaatgtaaaattgcgcaaagctaatactcaaattataatattataatattatatctaagtctgcaatgttttttctgttgctcatagactctcgtaattcctataaatataactgattccagtgcaattccatctttatcccttttctcctcttcctcatccagtctagcaattcaattaaattacaatgctttctgtgcagactacaagagccgccaagttgcaactaggtcaattacctctgattgcctacaccgccagaagtggaagacttcaccaccaattctactccaccgttgctgaaaagacagccaaccctacgccaaacacctcagataaaactaatatttttgatattagaaccaaggtgtacgatgagactgatataagaaaacatgacgacaatcagtttatcacccatcctttatttcctcatcctacgttttcgcaggaagattgtttgaaagttggttacgaacatcgtcctcctcggacttttggtgacaaaatggctttcagaggcattgaacttgtcagaggttctttcgactttgtcaccggttacaagaagccaaagacacaggctgatatcgattcaggttttaaaggtaccagatacgagatgacagaaggtaaatggttgaccagatgtatattcttagaaagtattgctggagttccaggtgccgttgcttccttcatcagacacttgcattctttacgtttgttgaagagagacaaagcctggatcgaaaccttacttgatgaagcattcaacgaaagaatgcatttacttaccttcatcaagattggcaaacctagttggttcaccagaacaatcatctacgtcggccaaggtgtattctgcaacttgttcttcttgttctacttggccaaccctaagtattgtcacaggtttgttggctaccttgaagaagaggctgttagtacctacactcatttcgttcatgaattacaatcaggtaagcttcccaagtttgagaacatcaagattccaaccattgcatggcaatactggccagagttgaccgagaattcgtccatgttggacttgattttaagaatcagagccgacgaagccaagcacagagaagtcaaccacaccttggccaatttagatcaaagaaaggacagaaatccatttgggttggcaattccggatctcaaggaaccgcaacccgaaagtggcttaaaggttacgaaaccccacggctgggagaaggaagaattgaaattgtaagaattgctcaggtttcccgatttctttctacatcatttttgtatcgttgttcatagttaggtttttacgaagaatgaagtcatgattagcacgaagttgattgcaccgtagtagccgctggaaacagctacagtttaatcgagagtagctgcaagtcagacctgtatggaatcaaaatcggagttgcagcaatatcaaatcccgcgcaagttgagagacatctcttagcaatatcgagaccaatacgatgaagttaggaattggccgataagagaacggagaaatattatacaaagcagaacctggggctttgcaggataaagaggaaatggaagcaaggctacgagaaaagcacgaagaatgggggactggaccagtagttatttaggtgcgattaacattgataatattgctacagagccaaacgccacgaagctttccgcaaagtagcagtgctgtgtacgtattttacggggttccatacgttgcagcaacgggttcttgatttccgctgttactagagcaaagatagaggatggaaaataagtcagaccacctttgtcaattggactaatattatatgagaagcgtaagactaaaaaatgtacgagagcaaaagaaattataccaaaaattgcaaacaccatttttttccggtagcaaaacacaaacgtcggtcttctgaagtcaacccgttcaagtcttcacatgcaaaaagagaagctcccttctccaactgtagactggtagtgtgagactatcgctgttttattccgttagataagaacacatcacgtgatatgaaacgctctctctgacctttttgcgatgaaccttctagcaaattctacgggtttctatgtttaacatatattaagttgcttagatcaggactgataataggtgtgaaaaaaaatatcacgatttcgcagcttactgtccagctataccaactattaccaatatagaattgtctcgtgacacggtctacattgaacgaacaccttcccggccatccactccctcatattcaagtcatacaattctagatatcatacatttctactagatatatcgatctgatatacatacaaccacaagctacaatggctaacttcgaggataagcacgatcctatcgttgaacttctcaactcgggtgctggagagcatgacgaagatatcaaagtgattagtagagatccgttcagcgataacttcgtagctacaccaaccacagctcagctcttggatcccagctatcacataaaggacgaggaaaaaagcaatacgaataagaatagcaacgcaggcaacaataatagcagtatcagcaatatcaacagcatcaacagtactagtaatatccatcacaacagtgtaaaccacagtaataatagcaataataatgataattatgacgattttcatactttccatactggggctacccccatagagccaaccggactaacaccaatgcttgcaccagcacctgattttgtgccgcatgccaacaaccagatcgcctacatcaacaaatccagctttttgaaccctttgcctcctatggctccactttcagaactggtccttcccaacggaatcaatataaaccctctagcattgaacggatcgagtaaactttctaacgatgacaagaaaactataaccaataacagtagtgctgtgagtagctctaaaaggaaaaaggaaccagctggacccaaaactagacctctttttgttactaagatatggtctatggtaaacgatccagacaaccaggaatatatccgttggaacgaagatggaaagacttttcaggttttccatagagaagaattcatgaagtacatattacccaaatacttcaagcacagtaatttcgcttcctttgtccgtcaattgaacatgtacggatggcacaaagtacaagatatcaacagtggaactttcaacctgggaaagggagataaaggcatggaagaagtgtggcaatttgagaatccaaatttcattagagatagagaagatttattggacaagattattagaaacaagagtgtttcccaagagagtgaacacgacaacaacgccgtcaacttccagatcctcctcaatgaattagacagcatcaagatgaaccaattggctattggtgaagatttgcgtcgcgtcagaaaagataacaaaacattatggaacgagaattacatgacaagagaaagacaccaacagcaagcccaaactcttgacagaatcttgaagttcttagctgctgtttatggtaacaatactggcaagattctagaagtagataatggtccagagtacaatgatggtcaaatgactgcctacaatcctggccagcccccatcgcctaacccctacgctcaacaaatgtacgctccaatacagaagccaatgcttatgctcacgaatcaagcacatggacctagtccgtctggttctacgtataaatctcctagacaaacttcaatatctagttctaacaacagggatcatagagatagttccattacggactcgggttcgatcgaagaaattataagatcctacggaaacactcccagaaatggcgagagaagtggcgatgctgcgaacaatgtgaataggatatatcaacagattatcaaccaggagccttcggctgcttcccctagacattacttccctgagttgaacaacagtggaatgccacagagtccttatgttggccccagcactccatcgaaccaacaatttttacgagtggcaactcctgataatgccaatgacttaatgaatggtttagagcaaaatatttacaagcagggacagctgattcagcaagttcaagactggatccagaaacttgcttcacagcagcagcaacaacaggcctcaattaacgaaattaatgacgaaatcaagcacgatttagacagttttgatgttaacgagtttttgaataacactaacgacccactgcaaacagactcacaacatcaactgaaacaggatccacaagaactccctgaggttattactccaggtctgaattcggagactccatcaaagagaactatagaagaggtgttcgatggagcagacctggaagtgcagcataaaaggagaagagccaatcaatagacctcagtggatgagaatacatatgatactattttcaaggaaattttaactctataattagttcaattcatttgtaccgggtatgtaaatacgaataaaatagaaatggatggaagctccagccgctgaaaattccatatcgagtaaatagaattttctttaaattttcatataaccttatgttgcataccagcctcataagaaatactgtgataataatgtcaaaatcggcagttaatgcaattgcgtttttgggtttgcatttgccacttttaggaaggaaagcgcttcttgtgcttaatctcacatctttgcgctgtcgagcgcattcaaaaaagatacttgatataatacgaacagcttatacgtgtactctatcagggagctctaaatcctgaatggctcctggcaagtccgaaatgcgaacccctaaatgtttatttcgttgagctggtcgattggggctgcttgttttgtattctgctgtaggtatttcatttagactcctaacaacccctgcacgcagctgaaggccaaagaatgcgtaactagtccaggatgatctcaattaggtggattacatttcatgtgcttctccaaagactctattttaagtcgaaaaaggaactggagatcgcaagtttcgattgcaatgatctagccacacccacgacacccacgttggtaggttgagaatatcgaagattacacaacagctgggaattgaaaccctggcaaacaagaccgagttccaactaatccggggtctattgataaccaaataaggttagcaacgaggcgcccgaaccattatcaaatgcacaaaatagaagacctgtgaaattttgagcctgtagctgcaggataacctctcctactgggaacaggatggagaaatttgcaatcgaggaactaacaattaaacttcatacccaacaatggagaggagttaaaggaaagtttaaagaatggattctgtctttcaactttacaaatgattactgaccgtagagaaagaaagctgattgaatatgatttcgtggctagtgaatgtaacattgcgcagcttcatctcgaatttagattattctgatgtcgatcacagacttttggagaccctaaacagctggaactagtagttatgcctaagagatatattaacagaatgggaattcgtttgcagagtctttttttcttaaactttaatcttttgtaatattcaagaatgcccagcaaacccgacaattaaattgtcagtaatttcttagcgatcaaaatgtctagatatcaattgctttggctatgggctgcgaaagaacaaggaataatttgcgagacgcaagaggaagacgaggtcagtagtttagcgaactttctctcgacataaacaactcaagcgctgtagcttccgcatcgcttttctacaaatttcaaattcggctcctgtctaaaggattgttttagctcgcggaggttgggatgtttggtagacagattagtcgattgttcttaatgtgatttgcggcacaatcccattaggagaggtctaactttggaagttgtgaggctgaaaggatgatgtcaaattttatcaatattttttggcgaagataacgccagacactaaaacaaatggcaaaaggatggagcgagatacacgaccattggccacacctcgtttaaaacgatgaaattgctttaaggcggtttacccaagctgaggaaaataccagtccatggaattgtatgtttgctatattgatatgttcgtaggttttcgtttaatagagatatttggtatttacgtgatattcgggggttgttccaggcgatagatttgcgagctgagaagcgcaagaaatcaacccatcaattttcggcgcgcacacgccggacgcacccgaatatgaaatttgatcgagtttaatccgtttcaaatgcaacttgcccaccgataggcacaggaagagaagtgatccgtttgcgaatttcggggggttggaaggttacaacatgacttacaaaacagtaggtattcgatctgctgttggacactcggacaacctcgagttgtatgagcttgttctgacacataaggagtgattccctggatcgaaaatcattccaatccgaaattcatagcttattgtctgttcttacctatttggttggcggctttttattctgacggagcgggtttggtcgagtctcgggggttatgccggaagtacataccggaattttaccgacggtgctactgaccgcaagtcgcaagtcaagccagacagctcaaagataaacttcactgattgcttttatcccttgtcttctgaatacgaaaatagccatatttatagaaatacataaacacctttacaagtgcaatacctgtcccaagcacagattgggccattctattataccagctccctcacagcctcatctatctagaagacgcattctcgtctcctaagcgcccttgtcttgtcaaacttcccggaactggcccagcgcacttccggaattcaaccccgaccctccaaagcaggcgacagtacgggctccttttaagtagacgcaatttctctcgaaatctgattccgcttctcaaccatttgcaccaccgcttcttgcaccacaacctcagcgtaaagccagccaatgtcgtcgggcattctagacttgggcatccgtgtacccaagctgaaacgagtctactcaaagggcggctgtcgtgaatgtaaacgtcgtaagatcaagtgtgatgaaggaaaaccgtattgttggcaatgcgttcgactccgcaaggaatgctcatatccggctgctggtgaaaaggtgttgagagtttcgaaaaagaaacagggttcaagcgcttcagacttgtcaacactaagtcgggaacccggcacctatcaaccacctctgctcccggcgcagcatcatatcaaacacatcaaattcaagccccacgagataaaaggtgaaaaacaaccaagtcagaacccaaatcatgttccaaatcatgttccaaatcacgtcccaaatcatgccccgaatcgtatcggtcagagcatacagaatatcaatcagggtcttaaccaaaccattcatagtcaacagattagtcagaattcaatccatcataatcagcagaactttcaccatagtccaccgaatcaccaagtgcccattcacagtcaaaacctcagtcccagagcactccaacatagcatacatctgccacaacaacctcctcctctactgagccaacattcaccagtacagaacatccgtcctatcgaaagcatacaccatcctatcaaccatcacccaagacctcccccattatcccatccattgcttcagtcgctttctacacatcaccagcttcctcaattgaatcttcacagtagggtctctccacagcaaatatcgagtgttcccgtcttatctggcctgactctacaaagacctccacaactaagtcatcagaattatcatcaaccaaaccaacaaaatttgaacctacagaatcaatatatccacaataatcagcaaaatgagaaagataatcttgaaaaagcacaaactcagaacgagcaaaatgaagcaaatagcctgactaagaccgagaaagagaaattgacacagaataaccatcatgaggtttttccacttccagagattactcgtcaacctgttgatgccctgaatgaaactcagtcccgtcttgctagtagactgtcgctgcagtcacagtctatcacaagtttgactactcccaaatatacctcttcgtctattgctaatttgcttaatgatatgtcaacgccacatccaacggattcgttcaagaaccagtcttcttcatcactctcgaatacctttagcacttcaccgcattctattgctagtactactcctacaaataaccataatgaaaagttccatgcacatgaagaaacggtccacaatccagaagtgtttctgttttttgatcaggaagacttgaacttgcttgcatctgatttgaacaacatcgtcagtaacataatgtatgaactaaactttgaggacaagttcgccaagcacagaaacgaaggtgactactccgacaactcattcaaatccacgcctacatctcctccacagcaaaaggacgcagctattcctaggaatataccttttgactacatcaaggttaaaaagagccacgagaaattgtatcttgaagagttctacaacgagttttctcaaataattcttcctttcagttcgtttgatcctgattcgaagaagtacttcaatccggctagagatataatccttagaagcgcttccaacgaatcatttctcttagcagctgttcttgcgcagggtgcaaagctctcttttcaaaagaacaatgtcctggaagatgaaggggcctattgtaattatttggctaaatgtctaaaattgcttggccctgctttggaaagtggtggtgatttaaagcgaggtgctgagagtttgaactctaatattgaatccgtattgttgactgtattattattgactgccgcaaatgcttccaactcaaaacaggattggagacctcatcttaaaggtgcaaaagatatccttttgaaaacatcggcaaataatttcaaaaattccaatgttttaatattctgtaaatcgtggtttgtgacattagaaattttggcaggtacaagctctaaattaggtggtactttggcatctgaggaggagatagactccttgataacctcagataacgagtatgaaacttccgtgttaaaggagcttggaatagttttggataatggctataatatcatgggtggatatcacaatgactgcgttggtctattcagagaattgatcaaggttttggctagaaagagaaaacaggggaaggatttcaagttcgacaattcatttgactatattaaattgttctcagagttttacaagtattcagaagtggagttcatcaacaagaagtgcattcttacaccggaagagtttgatattaagaattcaaagaattctccattggttgatgttctaaacttggattcatcaactgtaattatcagttggatggacactactcaccaatgttatgtgatggcagcgttaatcacaatccttaccacatgtttcggagagccattcaattcgcctcaggtacaatttcttgcaaacagaactatatcgtttatgtcatttttgacaatggcgccagaggcgcctaggctgattatcaaatgtgctttgatgatgattcaatggcccatgttggtagcaggtatgaattgtatagaggaggatggtaaatttattttgatgaaattttttagattctcttctcaagttggttctggaggtgcaagttatgctttaaagagaattagcaacatatggagtcgacatgaaaagggcataagcgattcagagtctgaagatgacaaggctgtggatcttgtatcatattagctataagtgtattattaagtatattactataaaggtaatcacatattatcaagtagactataccagttcatctggccactggctaatttgagccttgtatcaaacgacgaaagctcttcgtcagtgtctgtttcgacttcggactcactgtccccatctaactttgaatccaacaggacattcgagactggagattcgctgctgcaaaacttacaacgccttgttttccattctagtttccccagtgaaagcaagtcttgaatgtaccagccaattctttcggcacccaatctggccccatcaagatttgctgatgatggtccagttctcaaagaggcattctttccgatcatgaacaacaataaatcgttattccactgcaaattatctgtcaagcaagggaatccattaacacattcaatatcatggtcttgtataacaggttgaaggaaatctaaagatttaacgtttgcggtaattccagtagcaaagtagatgtagtcgatattttcaagctctcgttcgaaataaatatcttcacctttggctgtttttgtttctgacttggatttgatcaacaatttccaagtcttggtatcactatcccattctgaattagtgatagaagtgtacttcatgagatcgactctgccattcttcacatggtccaaaatctttttgtaatactctgggttaaatgagccaccttctctggcttcttggatcatttcccatctctcttggtctgtatctttcatatagaaagcagattttttaacattcttatacttggtcacccaatccaaatggaaatcaaaatgcttgatttttacaggtcctctaagcattaagtatattttagaaattccaacatttgcagcaacatgggccaactgagcagaagtcaagccaccaccaacaatgacaatgcttcttgatttagaagctcttggcttgatcatgagttccttaccaaggaaattcacttccttgttgaacaaatgtgtggtatgacaacttccctctggaaagtgtggatcctcaaatggttttatcgggtagtttacttctccacgatgtcctgttgcaacaatgcaaattttgcacccaaaagtttcaccatttgcagacttgattacaaaacctttaccgtattcttcctttcctaatacattgataaacctctcttccacatttatggcttcgtcttttttcacattattgtgcaaactgtatctgtcaacaatatccttgcaaaaatcttcaaaaagtttggtagatggacgatagtagtccttccaatccctcatattaatatcaataatacctggtttgtcatgattagcatttgtagacggaattggagaagttctctttctcgtgtttttcttagccaatttctttaattggtgtttggagtattcctttcccactacattcttgatttccataatgtcaccagcactctcacgttttgacaagtgagcaaaactaaccaaaccatcaacattaacaggatcagggtggaaaaacatgggtgaacgaaggtatgggatttgacaagaaccaaattgattatcccattgactcatgaatctttcaccagctgcgtcaagtaccaaaatatccagaggctgaaactttcttctaggtgcgtaacatctatcctttgaaggtggtttgaatgttgttcgggaagacacatttctattaatgaggttgaccctactacctctttggcggagccagtgaaatctctgatgttcatcctctgtgtaaatagaagcagggtactcttcacataacctggcagtgatcgcaaggctgcaggtgcccccaccaatgacaatcacttcgaagaaattttccaatggaatatcaacaatatccggattcattttaagtaacatacaatttcaataatgatcatacgagccataatcgtggaatttataaagtataaattagatttaccaaccattggtaccataaccactatagtctttgcaaccacaaaggttgcctggcaagtcatttgactgcgaaaaacgcaaacaatattttagaaactagcgaacactacttagagagctccaacaaaaccctcgatgattgcatacaatccaacagcaccaggatcgggaaccccaccctcttcggtcttaaattcagactcgtcaacatagctagcccttccaaatttggcatgtaactctctggtgttttcgcagcctttcttagctgcagacaaggaagccttgatatcacctgtcccttttaaggtatccacaaagggctgcaatgtatccactagagttctgcctcctactcttgctcgtgtatacttgaataaaccatcatacaaggcagaataggcagcatctccgaaagtctgcgttgtcaattccttcttctcgccaagactaccaacgagtttggtaagatagattgagtaaagacctccagaagtaccacccatactgtcttccaccaaatcagtgatggctgccaaagttgcaacagggtcggagaggttcttgtggaagttgcctttcttttttaattcaaagagaatagcatttgcaccggctgctaatgtttctccacaatcaccatcaccaacaattgtatcgtaacgcgtaatatcaggttcatttttaagcaaattattcattgcgttaactagagccttttcaaagactacggcattggtctttaaagatgacgaaatatgagacgtttcagtcattggagattcagaataaacagaatcggcttcccattgttttgaggtatagctttttggtttccatccaggcgcatcagtaggtgcatctaaaaattccaacaattgatcggttgaaaaccctacttttgctttagcaatgtttgaaagattaagcaaagtgatcgaaaaaccaggagagttgagggaagttacaaagtcactaattaaaatacgtttgggacgatttttggtaggaagttgaatgacaatatgttcagcaattaagtgcaattcgagtgaagaagttccaccaatattgttaatgagtaagatgtaatcatcattatgcaagtcaaaatctacataatggcggtccttgtcgtcaggagataacaatttatgaaaaaggtcttcaattaaatcatcaatatttggaattgggctgattttcacacctggttcattgtgaattccaagtcctacttcagcttcatcttcaccagtgaactcactggtgttcatttgtcttccagggacggaggtacgatccaatgaagctgatatggtcacaagattgtcgttgatggtgtttcccaagtgggcaatgttcttgagctcagcattctcggaatggacagcagcaccaagaatcttgtgaacgatagcagttccagccaatccccttctgcctaccatcttattctgctctctgcctacggccacatcatcagcgacgattacaagttcaacattataaccttcatttttagcccgctccgcaaccaagccaaaatgaagaatatcccctgtataatttttcactacaataattgtacccttttccttgtgagactttgttctgatggctgccatgatctgtttggtagaaggtgatgcaaagatatgtccacttacagcggcatctaaaaggttatcaccaacataccctccgtgcaatggttcatgacctgcacctccaccactaatcaatgtgatcttctttgaagtatcagaattggggttgaaaacaactttttcagagggaatcaagcgaactgccggattcgagtggaccaaacccttaaggctagagagaacaaggtcctcgtcctctgaatacttccagtgctttcttagtgtcatagtagaggtcaattggttgatcaattgcagaaaaaagtgaataattcatcgaagtttgacatatttattaattcgaaacttggggtaaatgtacagtatggttacgagcatggacaggatggatgatgtcatggaagcagtatgatgtcaattgattgaactatagatatatacatgttctcaccgttaatcaaaacgttaatcttttagatgtaaagatggaatggtcatggttaatgcatggttttttaatctgattatactatagaatcaggtgcaaccatttcgactacacgaaaagataatatctctttgagtggggagtgctacagacttgtaggaaaaatggataaccgagccgcttatagaaagggaccactgtgcttgcagaagttacactaggaagaatcgtacgattattagaatagctatcagatccctatagataagagagagcccatctctcgtctcggaaaatcccagattcggaaaaatttaagtcaaaaaagtccaaaaagtgccaatgaattgggcagattatcctgaaggtctgcgttatcaaattagagtatgtacaaaacgtttgcttacgtctatatcatcttttgctgaccattaaacggaatggttgtccatctgtatgaagacttcgtgcacactagagataataataaatattcaggcaggattaatctggatgaaaatatatcccacaaaaaatgtttatggctgagaagagccagttaacaatacaaaacacaaccaattaagcgattaagctaccaagcaatacacaataaacacttttatatttcagcagtttattcccatatatttatccttgcaaatgtttcagcatgtctccggagtcaattgaacgacgcaagacggaactgaagagagattacagtagaggaggatgtagagagtgcaaaagaagaaaaatcaagtgcgacgaaacaaaacctcattgcgtacaatgtactcggcttaaaaagaaatgttcgtatccgagtgtaggggaaaaggttctcagagtgtccaagaagttcctcgagaaaaatccatctcccaccacccagaactcatcaaagcctcttaccatacaactatacagaggtcccaatgatttcagtaagaggaagaacaaagtcgctaagtccgaaaaaagaacaagcaatgaaatgtcggcatcatcttctctgctggaattactttcaaaggaaatcgttctggaagcaaaggatggagattcttccttgaaaacgccatcttccattagcaatcttctcaactcttcgaatgaacaagagtttgcaataccacaaagtgaaacaggaacaatagaggagactactcctggaggatatgaccaaagttcaatacaaatgtcaactacaccctcatcgcttatattgggagacatgtatagccatgaagatttgaacttgttggcttcggacttaaacgatatcgtcaatgacatcatgtttaacggaaaattcgacacagcagtaacagacaatgaccccctaaatccattgctaggcttttctaaagaatctcccaatagtcagactatgccatataacgacgtcatacccaagcatgttcctctagattacatacaagtgagaacaacagatgaacgagtatatttaaaggagttttacgaggagtttgcaatgcaagttcttcctttcggagcatacgatccttatagcaaaacgtatgcaaatccattgcgagatgtcattctaaagtatgcagccaaggagtcgtttctactagctgctatattagcacaaggagcgcaatcctcgcatcgtaagagtttacttcaaaaagatcaggatgcctacggatcgtacttgtccacatgcttgcaattactaggacctgctttaagcagaaatagagataaaaatgtgagaaatgatttggtttccaacatcgagactatccttcttactgtattattattgacatcgtccaatgctactaccacttctcagggatggagaccacatttgaagggagcaaaagatatagtcttgaaggctaccaacagcaagatacgtctgtcaaagacattaatcctctgtaaagtatggtttgccgattttgaaatcttggcaggaactagttctagtctcggaggaacattaaaaacagacgatgaacttgaatctgtacttaatttcagtgatccctatgaactttcagtgttgaaagaattcggaatagtgcaagacaacggtttcaacatcatgttcggctataatactccttgtgttcatttgttcagagacttacttaagattttgaacaaaaagaggcaagagggaactgcattcaaaccagatgatgcagcagaatatgtcagattgatatctggtttctacaatgaaatgagtatcaagtatatcgattcaaagctggttgttatggacgatgcttcgggaaactttgctgatctcatagacatagttcgtacagacaagggaaacatagctcttagctggatggatacatcgcaacaggcgtattcgttggcagcattgataacgattttcacgcaaatcttgaacctgccctaccagtcaccatttattcagaacttgaacagcagattagtgtcctgtatttcattcttggacggatgtaatagggtaccgcaacaagtgatcaaatactcccttctgatgattcaatggcccatgacagcagcaggaatcaattgcattgatcatgaagagagatttctactcaagaaattcttcactttctcagctgaattaggctcgggaagtgctgagattgccttgaaacgaatccagaaagtatgggcacgtcttgacaatggaaaggagtacgaaagtgaagaaggggaaaacaatctagacatcgtggcatattagcatattgtatattagcatattagcgtagaaatataggtaacagtctataattttgcacccatttgcatgcgctaatctcgccgcacgcctgcacatttttcagctgagtattttatttctactatgcaattggggttagttactgtgtgcagtctcgtattttttcggttaccacttccgttttcgatgaccatgatgtctatactagttttctatggagaagtcgatattcaaaagattcataagatttaagtaattgtaattaggttgtggtggcagcaacggcaagatcagaagattttgaactggtcaaaaatttgcgatctttactatatttgagatttcatgactcaaatattattgtatttaatctaaactctcattaactaccccaagaatcgaaatagttacgaacaggagtttctaaaagagcatataatgactgcacttgaagctaacaaggaatctgattccagtagtcctgcttctgttgcaagtctaaataaaaatgcaactactgccactgaacaaaatactactacgcctactaatagtcccaataagaggtccaagaggtccaagacgttcacaggttgcttcacgtgtagatccagaaagatacgatgcgacttgctgaagccattttgtaacaagtgtacaaagtctggtctcatttgttctggatacgatatcaagttgcggtggtctttacctttacagttcaattctaagaatggaaatgccatttcgaccctggtactgttcaaaagtctggaaaccgaggaaaaagaagagaatccagaattctttcaaagacgaaaagttggatttgtagtatgggacggtaagaagaattgtagattatacgagacatatgatgaaatggacaaggatttgggtatattgcacaactcaggaaacgataaacaggtcaatgaacaaggtcgaacaaaattacttggaccttttggtgtatttttaggttctattctgtcagaatccggcgatggagaccgaaacccaaagagaatgaaaccaaatcactctgccatcatagagccaacccataagagtttacagaattcatatgtgtctactcctaacttatcagatactaatccagatctcggtccaaatgagcatttatggttgtccaatgaattgagagacgatgcgttcatcactgctgcagccttgaatggggacacacagttcttagatttcataaatatcaacgataacagtgttcttgcaccaaattcaagtagtctgaatttcagcaatcacaataacgctaacacttcttctgcaaactacgctttcaatgccaaccagaacgaacttttgaatttggtgttccacagaaaccacagcaacgtagcaggcaatatccagaacaatcagcagacgaatgctacaccaaacgaaagtacaggtatacctatgcaaaacatacttaatggaggtgattcttcattagcgataaatccaacaaatcaaaaattgcattattccaactataataacgactataataacaatccgtacctgttaaacgagaacttagagattcatttgcatgcttcgaaaacttcaaacaacgaagaagaatccacagatattgttgatggagaccattccaatagcgtacaaatgccaacttctattatgtctatagttcagagcccgttggaaccaaaacttggatttgacctctctattcctaaccttcctgctactataccgcgagtaggaatgcctacaacttctttgcaagtacagccgttgactcgttacttgcttaactactatataacacaggtggctgatttaatgacagttattccattgacggaaaatccctggaaaactatctactttcctagagcacttatggctattggagagcttctggcccttggtcaaacttcaacagctaaaaatgcattgttgaatgctttacttgcggtttctgccttcaacttgcaatccaagtttaagaagcattcagatcccatgatctactacttgaatcttggtattagattgagaaaccaggctagtttattcattaagcagttgctaagctccaagtccttctcgaatgaaaagtacaaggatgttctttgtgctgttatgacaatgattagtgtggatttggtatggggaacaatgcaggataccagtttctacatcaattggtgtggaaaagtcatagcagcaaagatggtcaacaagaagaagttgtcttccaaggctagaatcttacacagaatttttctgtccttgaaattgattcaagactctacttgcttaaatcttgaaagcatcaaggaagactttgtggcattcaatgagataggatatgatgtcaatggtgacaaatttggcaaccaggactcggctccaccagctactagtacgaggaagggaagaatagattacattgttaacagtacaattagctcaccgaagaaccctactaaaaacacgtcgccatcttttgtaaacaagaaattgatcaacacgaaaaagacagacgagcattttgctactgatgctctttacggacttcccaattcactcatcttacttttcagtgagacggtgcaattgttgcgaagtaaaatttaccacagcgaagtctacaatacgttaccgaaagatttcaaggaaaaagccgagaatcttaaccagcagttgatcaactggaaattagactggcaattgtacgaaaaccagaacgacgagacacagcctcagacagaagtagaaatagatgaagacatcagtgtcgtggatgctcagtcgcaagatgatgccaaaaagaagttcttctcgcctatgcacgaagcaacctaccaccatatcctctcgttctaccacgccctcatgatttactttaatcgcctaatcatggaagttccgcccaccaagctacagaccaaagtcgctaaaacccttagccatctcaatgccatccagaaattgatatctaaaggggaggcagcgatcattccacttttctggcaagggttcatagcagggtgtgaagctgtatctatgcatctacagatggggttcaagaagtggggtgcagatatcgcccagtacttagggtcctactggggtgcacgtcagatcatgttagaggtctggcgtagaaagagaatgttcgaggcccgcgatgactgggtcagtgtgattcaagactgggagatgaacctcatgttgaactgacacaaagaaccaacaaactatgcattattcattagccatggccataatacatggctgatggtttcatctctatatttgttctatatttaggcgtttgtgaatgatatatactaatagacaatagaatatgacgacagaccatttccaacaaggcgcaaagcaccaaggctccaaacgtgtgtggcataaggtcttccggaatgcaccagatgctgaagactttaatgtggcatttttctttcaaacttgagcaacaagtttgcgtctgccagaacacgtaagaaacgaataatggtaatagatgagtctaccgtgtttgctagtatttacgctgtactatttactaataagtatcaggggctcctcttgtgtctagaagttatgaatgagttcccatggctgtgtgcctagatgcgctaccgcgttcagcctgaaattggtactctaaatctaatacacgcctctcgagtttagacaaggttatatttaatggattcgcgcgtatgcctcaaatttttttgatttgcattttttgtttacgcgtttgttttgaattcggtttgtttaccaaacagtgcgtaccttaatttttctgatttgcgtagagatcgccgagcacatagcgactccttaccaggctctagaattatagcgtggatccttcttatggttatggactattattattttgatttatggaagggggtctcgcttattgtcgtttgccgtagcagggcacgtcaaacgcgtcataaaccagaatggttacaatatcgagagttgggcaacgccaactgtctgcctttgaggccacctcaaaccacactataaataagggcagatgtaccctcaatgcccaaaagatgaacactctacttcttaactcaaactagcttaaagttacttccaactacatacactctttcaatcactcaccatgcaatacaaagtcttagctgtctccgctgccttagctgcctctgcctctgctgcttccaccatcacccaggttgaaaccgtcactgaacaccacaccactgaggttaccattacctcttgtgaagaagaaaagtgtgtcactaccgtcgccacctcttctttaactgttctcactgagactgtcaatggtgttgaaaccatctacaccaccgtctgtcctttgaccgagtcttctacttccgttgaagctgaatccactccagtctccaacactgttgtcactaccaccgtcaacggtgttgaaactatctacaccactatctgtcctttgactgaaaccaccccagaaactgtcgctccagaggcttctactccagagcttaccaccaaggttgtcaccgaaactgtcagcggtgttgaaactatctacactactacctgtccagtgtctgaagaagcctctacttctcttgaagctgttgaaactacaccagctgctgctccagctgttgaaactactccagccgccgctccagccgttgaaaccactccagctgctgctgctcctgaagttgaaaccaccccagccgctgctgctcctgaagttgaaaccactccagctgctgttgctgcttctgaagaagtcacttatgttgacctcaccactacccctgtcgtcactgcctccaccggtgttgacgaaaccctcactgaacaatacaccttgacctcttactaccaacctgccaactctactgctgctgttgccacttacgaaggtaacgctaacaagttggttgctggtgctgctggtatcgctggtattgccgccttgttgttgtaagcagcttcatttgcatttcttcatgttatatgaaatatctgggccttagagcttagtgagctaaactgcggacaatagattttttcgcagccatgcaactctgcagcctctgcgcattttcaaaagcaatattctgtactttatataattgggttttcggtaatatatttaattagtaaaattggtgtagacttatttgtagcttctccatggccacaattatatacggtatgcgttcatacaccgttgaaaagatgtgttaaacctactctttatatgtcgtggtgagcaaattctcacgtcattaattactattttcatattattaaatgtcattaatctattaggcattacttaatattttctattcaggcactttgaacctcaactgttgtccttccgagtagatgtaattcaaagtactctcgtactcaccagtagctgtgatctcgatatacttcttgtatagcaacaacgcagtgtaggcatcttcaattgagtcgtgattaccggtctgtaccttctctttcaatagaacataggcaaggaatttcaaactcaattgtctcttgaaatcacttttgtagtagaaatcggctgtgtccctaatctgattttgcggtacttgcaagttaatacctctgaaatcattgtacaagccatgtcctacaaacacaacacctaagttcaaaagtaaccacaactttctgtaaactgtctgtaaagtaaccaagttcttttccgagttgatagggtccaagtctccaggttcgatacctgagaagcttgtgagatagtcgtagatttcaccagtgtgtacaacgtagtcatcgataaatgcaactccttgtttctcaccattatcaccacgaagagctgataaccttgccaaagaaagaaacttgggcttgattaactttttgtggccgtcgtatcttacttcgagttcttctggtctcaaattcacgaattcggcgtcaatggcaataagagtgcccaaacttggtgcttcctgtctagttaacaactcgtaatccttcttgtgggactccctaattgacccagcaaagtgatcgcgatatatgatagaatcgttcaatcccggcaaattggcgaacgtctctatttggaacaaatcaaaagggataccagaaatagaactatcgtggtataccaaaatgacaggcttcttccatggatacgaaaggttgaatacttcctcttctggaatttgcatgaccaagaaatcattgaacaagaaccaccttccatctatcttgacatatgaaaccaagttatgtgttcccaatgaaaaatcagattgctgactgatttcacaaacataacccaataactcatatctagtcgagtcctgatcaaattgtgtgagaaccggcttgaaagcaatgggtgcatcattgttgttgttcaaggcgtagaactctggaacaagccacttcttgaatccattgatcaacttgaattcctcgttggacaagttaacattcaacgataataaaggaggcaattttgtgatagaagaacgcacttccaaagtgtgtggatattgatgttggtgttgttgacatggtatggtcttgaactggttaatggtgtactccaagtaggttatcaaattatgatttcttctggtcgtagtaggtgttaccacttgctgctgtgtgttgatctgtggattaagtaatatactcaacttgttcaatacgttactgggaggtgtaagcaaatctaaactcaactgcgatccaaactgcttatcgtaaatagggcaagatggaccggttcctctaacttccatcacgtacagcactgtcataaggctcgaaatagaggagtctctggcctggttcattaaatccttgtatacttcagcaatcaagaatttgttgaaaccaatgatcaaattacgcaaagcctgagaattcaacttggctccttcgtcaagattaatcaagttctctgtctgagcaagtctattctctttaaacacctgtgaaaagttggacatattcacatttttgtcctttgccttgttcatcatgtcgaacaaatatcccaattcatttagaatcgaagatccttgcggattcttttgagtgataattgtttcaaaatcattgggtaaccattcgttggtcaagtttcgaaccatcaagttgtggaaagctggctgaaacttgtataattgaagtaagggattcacataagaattatcagcatcattttcaagcccgcagtacaatccatcagtcctgttgtagtagctgaaatcgaaatctttaacaccaaacttggagtactgaatctgcaatctcgaatagcaattggggatcttctttctactatttgcagtttgagtggagcttcccgaagaagacgataaaggcaccttgtactgaaagatttcattgtgatgttccttgttcaaattctgaagtgcaagactagctacgttctcagatgaatcgttattcatatccaaatgcaaatctgaactgttggacatggttttggtcaaggcattgtttctttcacttataaacttaggtacgttgactgtcgaatggatgttgcttctttccttaagagactgatatttctttgcggtgttggctggaccgtatttggacttgtcgtatgggaaaaaaccgacatgagattcactttctacgagtagatcgtggtcgattgggtcaggcaatttagccaactccttggtaaagctcaagtccgaggcatagttagagagtaacaagtccttgtagtagggcataccaattgtggataaaggaaccaaatcatccacaccaatatgctcagttgcaggaggtatgattacatccggttgttcaatgctagcagggaaattgacaaagtctttagttatagtcgaaccagagttgtttaaggtccacaagtgcattgtcgcatagctatcgctaaaggcaaagaagtcaccattctcgctgatttcaagattcgtcatgaacggagccttggacaattgcaggggctggcgcggttgcgatgtaggcatcaaatctgcttggtacaagaacacattggtttggtcatagatgtctacaaattgaagctggccactattggatgatatgagcacaatgttaggtaacttcgggtggaaacggacacaggaagcacctgctgggaacggtattggggccacagcacgcatcattctcacatcgtagatgttaactagggggtctaccatgtagtcattattggagttttgggagttatggttgtaacgtctcggacgaatggaatatccacatgtcgcaatgtaggagccttgaacgtccaagtctgaaagtaaacccgtatggccctggaacgacttgatagaggagttgcttacgggatcaaaaagttctagagctccattagctttacccaacgtcaagaattttgatgtctggttcactatcgatatgttgccgtcgtggttgaacgacatgaggtgtgacggcttattgagatcaaactttagaagcgacaaattgctacctacaactatatcgttcatagtattacagttggtcgtgagactagttaagttcttgaaaagaacggaatttgcgtcaacaaacgaatctgacagcaaagataacttggccaaacctctacggttgttgaagttgatgcaattgctcagaagcagcaagatcccatccttgtggtctagatgctgaagtatgggattgttgttcaaagacgacttgaactttgtatatggaagaaacagcaaactctgctgatagggattgactccatttgaatttggacctggtgtaaatgatcttgtgtacccaaaactgtcaccgcaccatataagattctgcaccgagtcaaacttgagagaagtgatggatgctggctcatggatatggggagagggacctttcgggggctgagtggtggccgctattcgggagatttcggtccagccgtccatttcgtgagaagagccgagaatgggttagttcaggtggaaacagaatggatcagggatggctctgtatggaaatggcggtattgcagagtttgtcgattaatgaattcttcatactgaaatgttggaggttgatattgttttggttgacgtgcaggataatgtatcatgtagtcgtgtgggtgcaaaagcgaagaagtagagatggatatggatgggaatggatggtggatggtggttgcaataaggaacggcagagtggtgggggatttgatattgttcgatattgttagatattgttcggtggtattgcatttgcttgggaaattggaaattggcacaattgctagggtgggtatgtaaatgcaatagtagtgggtgagtcccagaggtcgttggagaagataaagaatgtaggattaacaaaaagttactgccagtctcaacggtcagtttcgaactcgagcagctccaaagatttcgtaccctttgaaacattccatattggctgactacgacggcagactacgacggctgactagacacttgtatggccagcttggattcgtgtttttcacgtgacgagccgcgtgaacatccttttatcccacggtcacccaccggcattccatatgatcaggcctgctctcctgatcaccgtgggctgggctagcgtggcaatggcgacggccggagaatatacaagtctattattaccgtagtcatcagagcagaggaaaagaaagccgaggaacgaattgatgatcaggtagtgcaacttacaatcgtgcacttccagaagcaaagagctggaggggctcctccgtcgtggttatcgtggttacggtggtggttatggcattggctcctttttgtttgttatgggagctctgtttaccactgtggatatgcctgtttataactgacacggtttggtctatatgctgtactttctactgtatacatcaccagtctaagctcatattcatatctctatctggattatctggatgacgcggaccgtgtgttccatcctgtatgggctcggaggctcgataaggaatagaatgttttgtgtttggttactcatagtcacaacgcctataacacacagtttcatttcatatataagcgtgggtcccccatgagtcggctgatatcgattattttgtttgcttcttcttcttcctgtttctctccagaatcacctggttttggtttactccacaaaccaccactcgtctgccctccgtttctcttatcgcactcttttttcgggtacgccattaatttgttgcacccagatctcaatatcacattcttctttcccgctactccaccacaaaattggcgaaaatgttcaagtccagcatttcgtcctacttcgttccatcctggttcagaaagcctgccgcctcttccaaagacactgccagagccaccaccggcccaaagagcttcactattccctcaccagaaaacagtaaccaattagtcaacatttctatgaaagatactgccgaaacaggcgacgctgactcctttgtcgacatcgaatacagacacttgacatacgctgaagctgctctgttggctaaggacaagaaacaggctccattgaagtcaaacccacctcgcaaactgagattgcccatcaaccagtacaacgtgttgaccgaggaagacttggaagctgccaacgacgcttacgaacccttcaaggaggacaccaagagaaagaccagacagaacctcaagaacagagactttgaactcaagaaaaagagaaaggctctcaagcacaagaagcttgccgacttgaactgaagccctattgacttagcgcgctttaatattgtttgtctacttgctgtgaaagctggcttatattattgctactattgataaacctttcttcatttccttaataagtgcaatgtgatttgcttgtaatattattgttgcgtttaccgttggagttggagatagttcttggtggtaggctgcattgggatcacttcactgtgtatctcatcctataaccacggaacgtgatcttcaacttacatcaattacgactgcaacatttacaacgtgtcaaattgctacgctgccggtcccatataactagttacacaatataactagttatattgtgtgcttttcttgaggtgtgccacacatacacaatcccatgctggtccgctgtcacttaaacatgcaaaaattctattcctaatgccgatataatgatatatacacttgattgtcttctagtccttcctatttatgtttttacttcgtttaatgtataataccagctttcgacttcaatagctctattattgttgttgttttgaaacccaactgttcctcgtcacggtcctacgtttgtattgttttcttgtttttaagtttgtattccttatcaacaggaatttgtggagtgcatatctgtttactttccgctaatttattaatagataaggactcatatcagccgagctacaggacaaagttgtttggcgaaagtaacaatagagagccgaaggacgtgttcagcatagcctacagttactagcatagtggaagcagaaattgatcaacaaaatttgaacagttgagacgtggtagctcggtcccactaaaacgcgtaggaatcaccaagaatgttggcaccacaagcaagatatctagggtcagtagtacaggtgaaaattggcatggcaaaaggactgttgagacggattttctttcctaggtgaccccactctcctatctcaagatgtgttggctttttgctaaaaggacttgtgaaagttctacctctattgatctttatggttcttgactgagggttgccaacttcaataaagaaaggctgaatgaatacctgtccggtttctcccttaccgatattgcaagaataggatcccagataggaaaccgaagaaactacttcaggactccagtctagattgaccagaaccataccagccaagtcccaaacccatggaaaatccaaagtagcggtctttccgaaagttgtcgagatggaccctccgagagatccaccgtcgccaaagttgctattgagacacccactcaatggaagtctgggacccaacacagtgtctgactttccaggcttaaattcgtaccatgttgtcttatcaggtttgaagtcaggaaagaaagcaaacatgttacctcctgttctttccgcagtgttaagcttgtgcttattgacaactaatgttccagtgtcctcgatcacaataacgttgtctatattatcaaaatacgataaatctgtgtcttcgtcaagcgaaggaatcctgataattttgtttgagtccaaggcttttcttgggaccatcttgaaatcctttaattcaactggaaggtctgctctacatcgagagactagcaaaatcaaagaggtgtaaatgaaaaacttcatgattgacaaatagcacacatggagaaaattgaatagaaattcaattcttgagaataaagggtgctttaaagtagattcaagtttctcatttattacgccaattgtgcgattagtggctgcgaaaaactttgcagaatatttcgcaaaaaataagcagaaaattgtaccgtaatgaagtacaaacatacaactctaatattcatgtaactttttaaagaacctaaaaatctataaaccgctaagtacaaaaggattatgctaaaattcactcgctaaataattgatcgtattgttgctgttcgtcaaccaatggtacttcactcttgtagtcaaatacgacctgctttccaataaggagattccagtacgttatcaacttcgaaagagcaatctctgccaagttggcaggcaattctttgtagctcaacaatacaaacttcaacgcgtcccacacttcgttggcagcaatcttgaattcgtcactgaaagttctcttactgacatcgtacaacttttcagattcaacgtagtacaatttattgcttccttcgctggttttctttggttgaggtggcaatcttttctttgctactgtagattctgagcccttcgaggaagcagaagaatccggagtagaaaaaaaagggaaatcaaacccacccttattgctatgcttagtttcgtaatcacctggcttagccaagccctttttgacatcttcaagatgttctaagtacatgctcttgaaattgttgatggcttccacggacttggacaatctgtcgaaagtgttcaacaatgcaactatttcgattcttctgaacttcaagatgtcgtggttctttggatcttcactttcaaacaatatcttgagagcagtcccgtaaccaatggtctggatcttgccccacattctacatctgtcacaacctacgcaatccataattgctgagatgttcttgaatctagccctaaactcgtctttcaacttggggtccacagaggaggggtcaaacaaagttgaggtgttaaataatgagttggaagccaaagcaggaatgatatcgttcaacaataaatcgtcgtacttttcctcagggtcaaggacgttgctctctaacaagtgcttctgttgagcaggagagatatcatcatagccagagtgaataaactcttttaaaggtaagacctcagccaatcttactagggactgagctaccaatgcgtagttgaagtagatgttggccaatctgtcgttgaatgaaccaactctgttcatgaaaacttgcaagtttggataaaattcaccagtctctggctccaaatactcgttcgacaaatgaactgcaatagaagcatgcaatccacttacaagtcgatagaacaaattcttttctatgcactgctccttctcctctccgatcatagacataggattggtattagggaagcagttttctgagtagatggctttccagacatcaaacgattggtttccaccataaccagtgaatctctctgggttttctaagagatttacgtagacacattggtgatcatcatctatgtgcgagtagtccaagtcttcgcaggtttctggttcttcagtttcaagagctccatctcgagcagtagaaccaacacgttcaattttacccaacttagaggggttgaggttttcgttcttgaccttagtccagttgtactgttcaggggacaagatctccacggcgcagttttccgtggcacagaagtgttgcgcgttccagaacttacactgcttgtccaagttgaccttgaagtaacggaagtaggacgtcttgatgaggtctctcatggaaggtctgattgccttgttgacatcgtctatgtatgagaaggtagtgttacaagtaggggtaatgatctgcgaacagaaatcgggagagtcaaacggactgaatttgaactggggcaacgattgtgaggacagagccagcacagacaacacaagcacctgcactaggaggacaaagtaggagaagttcatactttagtgctagttgaaagtattaatgtgtagatttgatatggaggtcagtatgaaatgttatctatggtgttctaaagtggttagaatataattccagactgcgggtaaaatttcaatcaaaagtaattcttcaacaacagaaataggaagtatggaaaatgtcgaaaagatatgaacagttacgacagtctataaaaaacgaaatgaacaagtatttatgacaacagaacggtactagctgaaaccggagttactgactaatgaaaaaatggatttggtttgtatcctacaaaagaaatatagatgccggcccaccagctggctctgtgcacctccttcctacaaatggaaactttgataactgatagtgtatgcaatttcatgttttcaagagctgaaagagtaaatgataagataagatggaagactttagactgctgagtattcgtcgtactcacagtctgctgctcttcttacgtttgttctggttcatggcttctactattacagttgtgaaaagtgtctgattctgtctagttaataatattatgcggtctacgtaccgaaattttcagactcagttttgctgaagcatacaatacaaaatggggagtaaactgagcaatttgaaaacgtacaagattcatcttggaacttcggaaagcggatcctagcgtttttgacacgtatacccgttgtcaggttccaattggtgcccgctccgtctagaacctaatggaacagtatcgaatcattgtctgtctgcccgtacgcatgtgcaggccttcgtccacgtcagactatcgtgttactttttgcgcctctaaaccgtatttgcacccatttcactaaccccgttaactatggaggcaaaatccatacacttcaatggcttacaaatgaaagccaatgatccaccagtacatgtatgatccatgtaccaatctgtataatctccgcagacaacgtgtcattttctcggaatgccaggctgctcattatcaactgattgtctaccagttagaagtgcttttatgtctattctatgctactatacaattgtctattatgtacactaatcaaacttgatctttttggcagtcttcgtcatgtccacgtccttgaagaaggcaccgtaagcggaatgagccttctttttggtgtgacctccgaattttaataattcatctggaactggctggttggcacctctcaaaatattcatcaaggcaccactcaaatgcttttcatgttcggtgaaaagagtatgggcagtaccagtttgaccagctctaccggttctaccgattctatgaacgtagtcttctacagtcaaggggaaggtcaagttgatgaccaccttgacgttgggaatatccaaacctctggctgcaacatccgtggccaacaacaaactcgactcacccttcttgaaagagttcaatgcattggttctctgctgctgcgacaagtctccgtgaattgcagcaacgttgtaggagtttcttctcaacaacccttcgattctcgtagcttccttcttgtataatgcaaaaatcaacaccttgtcattcttcttggatccagactgatattgtctcaataagcccaacaactttttctctttgtcaaaaggttcgatgacttcaacgatttgggtgattctcttgttggcagccaactcatctctgtcaccaatgctgaccttgacaggttgattcatgaacgtagatgccaactttctgacttcttgtggccaggtagcagtgaacatcaatgtctgtctgttttccttcttggttccaccaatgatagccttgatggcatcttcgaatccggtttccaacattctatcagcttcatccaaaaccaagtaatctacagtgcccaagttgacggcaccatcttcgatcaaatccaataatctacctggagtagcaacgacgacgttggcattctttaagttcttgacttggtcatgcttgggaacaccaccataaacacaaacacacttgacattagtgttactggtcaaatcgactaagttgtcgtagatttgcgaggccaattctctggttggagaaatacacaacacactcaagccagacttacctaaagtcaaaatgttgttgatggctggaacaccgaaggcaaaggttttaccagacccggtttcagctacaccaatgacatcttttccactcaacaagtatggccatgcgacagactggattggggttggcgtgggaaacttgttcactactgcgctgatcttggagttcaactgtatctggtcaaatgacaacaatggtctcaagttcaaactgtgaggatcttcaatagtgacttcattggtagctaagaagctatcgatttcagattgtggtaagttagtgagcgattcagactgagtgtagccttgagaagattgggcagagccagagatggtggcggtgtgctcgtacttcttcttttctttcttttctttcttgtctttcttttccttcttgtcttccttttcttccttttcttccttgttcactttcttttccttcttctctttcttctctttcttctctttcttctcctttttttccttcttctccttcttttccttcttttctttcttgtccttcttttcagacttgcttactttcaccttcttttcaggtacgtcagcagggccgtcttcctgtcttctctttttgttcttatgttcctcaaccattttagtgatgattgcaataggtggtgtaataaagatctctgaatttttcactaatattttatatttctgatgagccgcacaatgagctgcaaggtgcgaaaaagagttgatactgaaaattgagtctatgcagaatatatttagggtgtttaagagtagacaccgtaagacccaccagaggtagtccgtagcagcatccagtggccccggaagtactacaaatcgaaaccaacagttattatgaatacatattctgctcgaaaactcttatttagccattgaccaattaaaaacgaataagctacctggttgagcacaacggatatataaggctgcgaaatagctatttaagctgtagcaccattgacaagaagtgttaccagcagagcccacatattcagccagagacctgaccatacaatcaatatagacatatgtatagaacaatcaacacaaacactttcatagctgccatagaaagtactaacaagtggctctaccacaaactacactaagaagaagtaccccagacgttcctcaatatacgcgtacacttcattctcggtacatcccatcccaatttttgaccacgtactatttcgcattcgcaccgaatcgagttgatttcgagccataaaatttcaacaactatttccaaacagtgccattcaatcaccactgttctttccgtaattgtctcgattcatttctcaattctgtgaaaactctctgacatgtccagcaagagaagagcatacccacagccgctgtacaccaacggccccggctctcagctcggaactcctcctgtagccggaggattccaacagccaaactatggtgtggaccagttgaaccaacagttccagggcatgaatgtagaccccaaccaggcagccgtagcaggagctccacaggctgctgctgggagcccatacggctataaccagtaccagcagcctggtgctaatgcaaatgctgctgtaggaggtacgggtgctgcaattggtaacactaacagcaacaacaataatatcaacccaggtgccaattctccatatgacgcgtactcgcaaacacaacagcaccaatctcgtgctggcaatgctgctggtgcctcgtcgtactaccttcaacagggcaacattaatgcggcgctaccattgaatcaactctatacgacagatttgtctcgtgagttgcctcctcccatttctgacttgtcgttgcctcctccaccaatcgtcttaccagctggaacaactttgattccaaactcagaaaccgccaatgcacaaccagaatacttccggtcgacgttgaatgttatccccaccaactcgtcgctcttgaaaaagtcgaagttgcccttggctctcgtagtgaagccgtacaacgctttgaaagttgagcaggaagacgttcccgtgacctcagacacaacaatctctagatgtcgccgttgtcgtgggtatatcaacccgtttgtgacattggctgaaaacggtagaagatggagatgtaacttttgtaatttgttgaacgatattccttcgctgtttgaatacgacgagatcagcggcaccgttaagaataagttcgacagagtcgagttgaacaatgccgtcgttgagttcattgctcccaaagaatacatggccagagctcctcaaccgatcgtttacacctttatcatcgatgtttctatcaacgctgttcagtcgggtttaacgggaaccatcaccagaactatcttggagtcgttggacagaattcctaacaaaaccaagacagctagagtggctttcatcggagttgactccaacttgcactacttcagattcaatgaaggcttggacggcactgaggtgttgattgtttccgacatcgacgagcccttcttgccctcaccagacgggttgttggtcaatttggacgaaaacagacaggcagttgaaaagctattgattgatttcccaagctactttgaagacaccgccaaccagggctttgccttgggccctgccttgaagtcgggtcacaaaatgatcagccatattggaggtaaattggtctgtttctcggctactttaccaaatattggtgaaggtaagttgagcgttagagacgaagccagcgtttcaggcaagcccaaagaagcaaagactttgttatcttcggcagacagcttctacaagtcgtttgctgttaactgtaactcgtcgcagatctctgtggatttgttcttgacctcttcttcctaccaggatgtagccacattatcgaacttgcctcgtttcacagccggtcaatcacacttctatcctgcgtggaccagtgccaagaacgaggatgtcaccaaactttcaaaggaagtcagcgaccatttgtcccaagacatagcattggaagctgtgttgagagtcagaggatctactggtatcagaatgtcgtcattctacggtaactttttcaacagatcgtcggacttgtgttcattcccaacattcccaagagatcagtcgtatgtcattgaaatgtccatcgaagaaaacatcaataaacctgtggtgtacttccaggccgcagtcttgcactcgacttctttcggtgaaagaagaatcagagtcatgaacttggctatccccacgtcgtccaagttgaacgacatctatgcttctgctgaccagttggctattaccaatatctttacacacaaagccatcgaaactgcattatcatcctctttaccagacgccagagacttcttggtcaacaaagtggtggatatcttgaacgtctacaagaaggagttggtagctggtaacgtttccggtgcttctcctttgcagttgtccacaaacttgagaatgttgcccatcttgctcttctctttgaccaagcacttgggtttcagagcagacagagttccttctgaccatagggctgctgcattgaacaacttgggctccttgccaatcccatatttggttaagtacatttacccaactgtatacgctttgcataccatgcctgatgagtgcggcttgccagaaaagttgatccaagtcaacgaagaaactggcgaagaagaggaagtcatctcaaccaacatcatgttgcccgaacctataaacgactccaagtcgtcatgggaaaactacggtttgtacttgattgacaactcgagtgaattgttcttgtgggtatccggtaacgttgtgcctggtttagtacaagacttgtttggaacagacaacttgtatgctattccaacaggtaagactgaattgcctgaattcagtgatgaggagtccgaatttaacttcagagttcgtcaaatcattggcaaaattagagaaaacaacgactccattgtctggaagaacttgtatgtcgttgttggtggatcctccaacgaaccaatcgagatttcccagcaacgtgacttgatggctttgagaatgtgggcctacagctgcttggttgaagataagaccggcagcgaaccatcatacagagacttcttgaccaacttaaaaaccaaggtttcccagtagatgataaaaggacattgattttgttgtctgccatgtccatcacgtaaatttatttctacattatataaattcattaatgtattgtttattgcaattgtcttttggttaaatcactctatctagcacccttgatgagatcaatagcatcaagaagaaagtctctttcattgtcgttcttgaacgtttcttcaatggattttctaataccttcgtagtatatcttgaggttcttggctatgggacctcctcttgccattgtagcagcgatgttcttcttaaacttgaacgacaatcttgaccagtagagctcagacaacttatttacttcatagctatgaagtatgatactcaagaggctctcgttaggagagagattgttgtggagtccgatattcctggatacttcccattccgataaaatggacgtcaacttttcgaaatattcagatgactcttctttaatttccgtgacaatagctgtgaaatttcttggagattgcaaagatcgtgacaattgtgttagggactgttgaacctgtttgttgatagcagacttgtctatcaccaggaagaattccttttcatttaatatattcaaggctatcaagttgttctttaaagtattatttttcgatgtgaaagctgtatggtggttgaactcgtttgttatcaccagaacacattgagtctgtagatttgtcttcttcgtgatttcaagtggacggtaatctctgatgaacttgattgagagtaccgaggcatccgtcacgttagtagagttctgatcatatagttctgaaatctggacatgtaatttacttaatctaatgagatccttgtagtcgttagaagaagaactggagacctctttgtccaactcttctatctgctgaatcaagaagataaagaaagaagctcctcttaacaagtccaacgtcaaatggatctttctgagtgcattatttaatctcaatgcatcttcatacggtcttattatttcagattttattctatcaaacgagtggttgactctctctactgctggattgattctttggcggagtatatcttctgagtcttcaatcttggtgaagttggctacaagtgtctcataattgttcgcagaaatggtactcattcgtttgttgcactcgtcaatgtcaaacttgagcttcttgataggagtcaaaagatccaattcaggaccgtcactaccattggtcgctagaagcaaatcattggcaaactgagtcagttggaaatctggctctagaaaggcctcgaagtcttccaattcgtttttgacttctactgttgtcattccaaacaataacagttaattgtatagtgataaatgaaagttattgtctttatttgttactactaacaatgtttcgctgaatgagattcgtgttcattgatttgtgttcttgattttgtatgcgcactatgaatacaataatacttagtacttaaaaatcacatactaactcaacaaacttgactacacttgtttagctcacacaattggccaattgccaatatgtacgactaaataaactacaattacttctagggaagttttcattgacgaaattacttctcatttgctttaattatcgtagatgatgcattttttgaatagtctatcagtatactctttaagacagacgtgaagatttcatattaacgtagttacaaacgcaaataaagaaacggaaactaagtaaaagaatttccgcataaccttcaggcctgagatactttctaaagaactcaaattcattcattgtcgttagtttattccgttctatactttggctttgctggtgcaacttccttcttcttgtgcttcttgcctcctctcttgtggaacatcttcttcttcaacttggccatcttctccttttcgattttcttgtacgtcttggctctttccaactttctttctctacatgctattttgttttctctcttcttcttgccaggacgtctgttcaacttcttcttgaggagctcgttctctattttcagattatacttcttcaagtctatgcatttccagggctgaagatctatcacaacgttggcctgctcatatatgtcttctgccgttatggcagctgctatgaattgtgttttttgttcttctgaaaatcgagcaaaatagtacgattctggtctttcgtttactattacttcttcatagtcttccttcaaagaaactttcatcacctgtggtctcgccacattatctttcacgtcctgtccctctttattcttgatatcttccctttcatcggaagcaacactagcaaatagaggaaagtcaaactcttcgttttcagatgctacattctcttcaagttcttcaaccttttcgtcgggtattatttcaatatcgttcgtatctttatccacttcaacaaactcaaactccaagttgggcatgtagcttaaagggtttgaatctccatcatctgaactggaaatttcctcatcatcatataacgacttcctcgttatcctatagggatttgttagtcaaatctgaatatggaataagatattctatctttacatacttcttagttgacattgtcggtattctataatggtctactaagagaattcataaacttgaatctatgaacttttcattacttctcatttttcgcaatgagcacaaactaaaattccttcactaaaattatactacataattagttttttttctgtataatattacatgatcattatttcattacagattaaatagaacaagtatgatacataattcaagtagagaaaacactgtcgtattgtgttcagatcaccataatggtcttgaatgcgatccaatggttctaatggtgtcctttctatagcctagatgaggtggaatgaacttggagatgtttttggtatccactactacgtccatttcgttctctttgacaacacagtgcttatacctactgacttcatcaaaaggacgcaaagattctaagacaacctccgtagaacattgtttgaaattcttccaaacaagctcatgagttgtagggtattcttcttcaactaacttggaaatatcttcgaattttacaaaatgtactagcaagttttggaattgcttatgtccttcggttctcgacttcgcacaagggtggacatcgaggctgggatcaattccaataatctcgtaaaataatctccacaatttggatttgtcagttgctgtagcttctactctagaattgttgctgattttggaattccacttggaaataggtgcacccataagtagagaaatctgaagatctgtcacatactgaacggaattaatgttaaaaatgtacaaaggcaaatacttcttcgagtcctcaatggtcgaatctacgttgaatttggctcttcttaatccaacaggataattctcaatcgtgatttgtctcatcaattctactcgttgaacttgcaagatctttgacttctcttcagcttctttggccaaccttactcgttccttctcttgcaattctgccaatttcttttcttcttcgattctcttttcttcttcttccttcctttgacgttctttctctttctcttgtttcaagaacatgtctcttctggctctcttcttggcttctactttttcttgccagattttcgtttctaattccttctttgccttcaattcctcctgtgcttttgttaatggagttggggagggagatgctgtcatatgcatagctctaaccttgtgcttttctggaggaggcgttgatgattgttctctagtagtaacgcgttcaagaggttctggtgaactttccttgaaaacgctgcttggttgaatcttgacctttgattccagcttcgatttcttcaacttcttggattgctgttctctgtccgatggatgctttctttttctctcgtcattggacttgacacgcgtagccttggactctcgttcgaatgaatcatcttcttcgctttcagagatattaggagaagcagcagtagaagttactgctgaatacaccaatgaatgtgttggtgatgctgctctcgaaactgccgtggaagtaacattagaattaacttctcctctattggatttattcatatattcttcaatgagtttgatttcctttgggtcaaagtgagctgatctctgtgcaatttgtaatgcattcaacttatcctgcttacgtctcttaaaggggtcagcatcttttgataacaaattctcaactacgtcataatgacctcttccaactgatgctaataaagccgtaataccacatccaccttcagtatcaatgttatatggcgtaggattcaatccaagtataatgtcaactaattcagcatggccgtttctagcagctagtattaaaatatcaggcttagcactaaggctattacccgaaacgaagtagttggctgtgacttctttggacccttcagcagcatacttataaatacctttctttttgataagctcgccaaagtaattgtcgtttggatcgtctacaataggatcaggtgtaggagaagaagctttgattatttcaactttagtagccaacttgaacttggcactcgcttcctccaagagcttgataatatcactataagcgccttcgcctgaatgttcattttggatctttgtcaaagcgctgaaaccatcgatgttgtagatactagggtcagcaccattatcaagcaaaagtttgactacatcaaaatgtttattctcagcagcatcgattaaaggggtctccatatctccagcggcatcagctttggcattgacattggcacctttctctatcaaatattgaacaacgtcagtgtgtccctctaaagcagcttcgtgtaaacaggtaaaaccacagaaatctttttcgtttgcacttgcaccccgttgaatgtaatttctgacttcttcaagatttcccttcttacaagaacgttgaagtaaggtacgtcctccagaatctctcttgatcttgtatggttttaaatcccgtttcttatggctgccgtcatcattatgatatccgtgtttcagaggaaaatcgtcatcttcgtcctcatccgaactgtacatcgccttcctcttcaagttgtggcggacctcgtcaagttccttcttacgaatgagctttcttcctctatttattctaggaggcgaatcggcaataatcgtttctgcttctgaactcgactctgcttcgtctgcttcatcttctccttcgccaatctttaattggacttcacccttttcatcttccgaaatattagataggagactctccctaacttcaggtatacttgccaaggtattgaaattgaaatcaacttcagatgccgactctttgataggagacaaagttgaagtatcgccagtttcagtagtgccttcgtttacactttggttatcttttgcttctttggcttcatcttctttatcatctttattatcattttctttagaaatggttgcaagggaagataccgattcggcaagtgctgattcttcgacgacagaactcttctcaatctctttgatctcatcatctttaggaggtatcaatttctgagactccgtctctaataggtcttcttcggctatactgacctctttatgttcttcggttgaagtctcttcattctctttaccttcttcttgacgttgtttagttttattattgttgtgttcgaggtatgctgctaatgaggtcttctttggagtatctacagaagcagtaactttgggttcttcagcttggctttggatatcatgaggtatattatcttgagatactgtttcaggttggatatcaagagcagcgtgatctacttcaacatctctctttggttctacaatttctttctctactggatgtgcagattccactttatcagtgtcattcttatcatccttttcaatctcttccttaaccgacacactgttctctttaggctcgtctggaagatcatcatcgaataggtgtaacaatttcgggtcagtaatcggagaagaatctttagtattgatattgtcatttacagacttctttgtagagtcttcagtagatgcagaatttttctttgccaattcattcctgcccgaaacaggcgaatatttatcttcttgatttccaccatagtatctgtcaattttggaatctcttgtatctccatacgagcttctgtgccttctatcgtctctgaaacccccctgacctgcagagctgggctggccagaaggacgtttctctttggaatagtcgttgtttcgtctgtcagaaactgaatctctacctatattgccactggaaagggatttgtgaagggatctttcgtcaactgacgagttgttagagccacgataccttggaaatgattcatatctatctataccaggtcgtttcttgtatggagccgatgattgtggctgtgtattagaagaagaagacgaagaagacgacgctgttccatagtaaatgctgcctccatttttggtggtggtagagtattggtttcggttattagattgacttcccgaatttggtgcggatgggttcatgtacttgttgtacttgttgtcgtatcgtcttcctccatcctgtctttcgctgtggtttgaacggtatccgccatagtagtcacgatctctgtcgcttctttcatttccagaattacctcttctactataagcattgtatcccttatcattggtattctgtgaagagctgctagatggaggcatactggaatcaccactatcgttgcttccagagccatgcccctgatactttttcggaggcccaccaccgtatcgctgattgtaatagttgctatttcggttgtatggcatgacaaaatagatgtctttctagagatatcaagagtatcaatatggaaaagttgtagtttggtatgaaagtaacgaaagtggaacggtgccaatagaatatagttgtcgagtctatggatgatgacgatgtagtgagttgagttggataccgcaatcggtatgtacgttccagagagctgatgactgggaatctgaagaatactggctaatatataaattttcttccataattgtaaccgaaaaaacaagtactcgtacaggccatcatgacatgtgatggataataggtatatgcagtacatatcttcaatctatagagatagtgattttccttggatatttatctgtttcctacttcactaatagcaccctattactctgttattagtataatagcatatggccatctcttacaatacttcactcgacatttttctaataaccgcgttttacgtctatatgtatatttccttatagccgatagatatgatcatcattcgttaatagtagttagttctggcccaagatttcgccaaattccatgagttcaaagatcaaactcatgttagggcagatacggtcacacgcatcgatgcggttgcccttttcaccaataattctgttgacagtctcgttgatattttctgttcccgatttcaagagctcgtaggcttcattgacatttaagccgaatttcagcatgaagaacgcaactacgacacaagctgaacgtgacactccacactgacaatggacaagaatacgtctgcccagtgagtagaagtgttccatcttggtggtgatggctagcaagtctttggagatggcagaagtatgagaccacggcacatggatatactctctttggcccgctacttggttacggtagctcaacgacatatcttggcactctttggcaacattgacgatgaggtcaaagttgttgatatctacttttgaatcagagtggaccgggtctgagtacaagtagatctggccgttgagtacattacgaggcccatctttataggcgttgagcagattcgattcctgtaactcttcaggaatgataagtttccgaatgtcactactatccaaactgttgctgctactattgctgtaattcttacggctggatgtgttcgaccagcttcgaatttgtcctggggactgtcctagaactttggcggcttggactcctccatgcggtggttgaggaaagaactcgtccaagtcgtcgttgaccaagtccttgatggatacagtagctaagtctgaggcgatgtttcttgtagctgctgctagaggtggcgtattgcctccattaagtattagaggactccgtaacttagggggctgctcctcaaactgatgcgcgggaggcttaaaatcagcatagttcactacgtttgttgaagcagggaacttgaatcccatttcgcgtgatacgtctatgtcgcttgaatgaggtgctgagctgctattagctcgtctcggtatcatgggaggcaagttaggagttctggtcactgctggtgtgaccaacggtgagtcgtactggttgtgactactgctgttgttactgccttgacgaacatggagtatggtagtcgtggttgaagaagactccgtagtaaaattcgttggactgctattagaattatatatactattgttgtttgtagtactactggtattgtcgatattggtgttgctattggttctagttgtgaagtagctgttgatgatgttgctggtactgcttttaatgctactggtttggtttgatgtagagtcgttggatgacagtttagataaaggtagcgatctttgggacgagttgccaaacgatggcggaggattgaatggtagcagtttcagaggtgagttggcgttatacgtgtatgaggagttcgaatctacagaactactattggagtggctgacacctaggttcaatgacaaattcttcatatttcggttcatggtgagcgaactgcgttttcgcgagtgtttgggtgaatagttgaccatacccacaagaggatccgagttggggaaagcattagaaggttcaggaatgctggtaatgggtatagcaccagtatttgtaatggaatcggtaatatgattagtagaattagtggtgctggaactactggtagtactcgtctttgacgtggttttatttgaatttgtaggtaagccatcgtgcgatgatcgtctctgtgagctactcatggctggaagcttttggatcttgtttgataacgtcggcgtggctgctatggccgcagctgctgcgatagcggcagtgaaagacgaactccgagtgtacggctgatggtggaaccggggagtaggtggggtctctacgttgaaagtggtagacctttgcgaacggtcttggtctgtgttggcagcggactcaactaaaaaaggactcatagacggcagcagccaaaagttgtgtatttcggattgacggcagggtctgggacgtggaacggagtagttatagtcgaaacggcgcagtggcagatgaaaaaagttttatatggaaatgagacgtctggacatatactgaatttagtatgagcactgagacttgaaacagaatagtgaagtagcgagagcagtggaaaaggaagtagaaaatgtacaagtgaagaagcagtgaaaagttagacgtggacaaagacagaaatgtagcgggtgccagagatgacgagctgacccgtctcgtaaggttaggaaatctgtgacaataagtagtggtggtggtgaaaaaaaaattcgactaaaaccgctacccagcttcagatttctgtttctgattattatgaaatgtttcaggtgtcccaattggaaaccggcctggcgaaaaaaaaatcgcttttgtggtgaacacaccagtaggcaacaggttcttgccagtacagcgacagtacatggattggccgagatggagctcctgcaaagctacagcccgctactgacaatgccaccgctggataatggcactctgaaatgggactagaatggcacaatgctctctaacaattgaccatgtaggctgttccactacaatcgccaactagagttcttagcccaaggctaactgacagttctgattgtatctgcatttataattttgtacccctttctcaccaccgtgtagttgtggattcaggtacgcgagtcgactactggctatgaacaatggtataagaaaatcaccccttgactgtataggggccagaagccgttttgaaccagaattcagggcgggcgacaatttgtggacctcggaccttttcgtacctgtttctggccccctttcacgacggttgatggtaccttactgaaatgtgaatctggattagaaatcgggcttaattcttgtttcgacacatgctagccaaactttgctgcagttagtcaacggctgcctccatttatccacttctagactaatgacaccgccaggtacggtacggtgatagaaatctcgtatccccatgtcgctctattgtgtgcccactgctcgtgtctattttttctgtgggttaaaaatactccattccatcgctcaatagtctaaatattttattgatttcttgaatattatcctggtacaaaatcacttgaacattgttcaatattgtttgattttatgataccgactttcgttttgtcagtaaggtattgtgcctgcttaaacctacagctctacaaagttctacaatgaccctttcgtccttctcgtcacggttggtatatttgacaattaaaaagcccgttgcattgtactcgttacgaccattaactgcatgctatcattatcacattatctcttctctttctctattttttacacctctattctctactgcctcgaactctctctctatcgctttgttctctattcttcgtcgtcgttggggttgggaccaaactctccttcgaagatagttgctccagccttgcgaagattttcaatagttacacactcgtccatctctaaaatcattgtagcgttgggacgatcaaatgggttggggcgcaacatcttgttgaccaacttgtccaagatcatcagatctccactgattagaaattccggagcccacgctggaatcaagtcgcgaatattgcgtatggtcgaagtactacaaccactggttgcaactgtaggtacattcggggtgagcaaattcttttccttgctgtttgctgaactcccagacagtggaagctggaagttggccggtccttcaaaattaagcgactggttggacgagaaattaacgttcgtattgtatgacgtcgtagatgaaaagttttgatgttgcaaaaaaatgctaatattgtcactggacaacttccctgcatcgcttaaatctccactacgtagcttccgccatggcgtaccattgtccggtaagatgatgttggcagcaatttccaagatcatcaacccaacgctaaagatatcggcaaatggtgtatatatcttgtcgttgatcaattcgggagcaatgtagttgcggtctccctccaagtcaaagtctttttctaaaatcggcaacttggtggccaaaccaaagtctccaattttcaatgatccttcaaatgtaacaaaaatgttagccggcttcaagtctagatgaagatagttcttcagatgaatgaacttcaacccattgagaatttctatcaatatcttccagattctgaactcgtctatcttataattcttgttctcttccaagaaatcaaagagagtgccgttgtcacagaattcagtcatgatgtaatagtaattgttgaattcccacgcttcaatgaagtatacaaggtactccttcccttcttcttgttcctgtaagttcaatttctcattatctttgacagaagtcaacactctcaaagcttcgacttctctcataattgttttacgctccaatttgccgactatgggtttcttagatctcttaatagcaaacttttggtcctggaaaagacactcgtaagcaatagaaaattccccgctgcccacatacttgatgtttttcattccgaacttattcaccaaatgatcgtctattctggacggcttaataacttcttgcagttgattgaaactcgtgattgtatcatcatcagggttcattatctgcattatagttcgatcttcggtcttagcgtctacttttacgcccttaccaagaaataccaaattagtaggcgtagaaggttcttcgtttgacaacttgagcgatggtggtttaagaggatgaagcaaatgcaaaggactgaaattggctggcgtggaatgtgacttcttgactgacttggttggagtctctggtataccaagctcagcatctgagcccaaatccatatctatttcttccttggtcaagatatgtcccttgtttggagctgaacttgaagggatccgaaagaagcttgtttgagactcattgagtcctgaattatacgacaagttatttctacctatttcaatagactcttccaggttttcctcgtgaagtccttccaagcccatagtattgttggtgagactatgtgagcttagtggcttgttggtgtttaatatcataagtggattcctcttgactggagtttcaggaggcaattttcgtgattctgtatttgcacagttcttcttcaccaatccagttgatttgaaagctgtttgaagaggtttgacaaaacgatatgagtttctattctctttatcatcatagtctggacgcaaaggtgccgttggaggcaatgtggtgtggaaggttgaaagagtcttcttcttatgttgctcatttgcatcttgatatattataattgagttgctcgaagaattagaaaacttcctgcttctggaaggactatcaacatctaagtcgtctacattgtagtattctagtgagggtattggaggtgacgagtttggcttgttgaaaggagacttgttgtagtttaatgaggtctttcttaactttgaagtagagtgatcattcttggtatcaaaaatggttgatatctttttctctggagtagacctattaggtgatattatggcgtctcgattggcgtttttgaacatcttgaaacctttcattcctaacttcgagggcgaatagagattggcttggtcgagtgcgctgcttttgtgacgtagcactctttcaggtgaagagcgactaagttggtagagtgtggtagatgaacctttattggaagatggtgatggagactggctgaccaacttatggggtcgcttgaacttgttggtgttgttaagatgcaaaggtgttcttgttgccacgggactcaagctaataggggtatgttctttggtgtgtagtttcagtgactgggctacggctccgataatggaggaatcgatttcgttcaagtcgcttatggagtctatgtcttccatgactctattgctcaacgctttgaaattcgaatctatagacaagttgaggaacttggaagatctctttatagaagactgttgtgacgatttaagcttttctgattcttcatcggaatgcaataaggtttcatctatcggtttagatttcgttaccaagttttggggaatcagtttctttggtactttttctcgtttgggtttgatgatgcttaatgtagaagagaagggtccttcgtaatcgttatcttcgtccttatactcatcatcgtcatcatcaaattcgtcctcttcgtcgagatcgtcttgaccaatttctatatcgttgtcgttgtcatcattcattccgtctatttctgtggcatcttcgaaaagataggcgtcgattttgtctccatagtaatcttgttttacattgaatggaggtgacttgttgatctttttacgagaagagcccccgctgggatgtggattgagctcgtctttgatatcgtccaagatcaagctgttgaacgaccgggaaaaatggttattggtgaagtactctagcagattgttgttgatatagatcgatggggtttgggccaatgacgactctcgtgacattttacgaggatggctagtgggtctgttactggtttgtcctgctgttgtatttgttgttttgtgattgggagtcatgagactgatgctgggatcttcatatggtgtgtgtttagtagatgacaatagtgaagaagaagaggaattggttcttctagacgatggtgtagtcaccgagttgccgttggttccagcggtggaggacgttccgccagaaaccgacgggcgttggtggttcatttttggttaagttctgaatcagtagctgaacatgcaaggtggttatggataagatatagtgactcaactagtaactgttctagtaaatgacttgtagtaatttggttgtggctcttgagcaatggttaacctgtgatatataggctgaagcaattgtgctaatttggacaatttgactgtgcttgttgaaatggtacaatttagggaagttgaagttctatgtggttctattgagacccgttgttttgatttatgtatgggtatgaaaagtatgagatgggtataacactctggctgtgaacgaagaaaccagcctgtaacgacaataattcagtacctgtgaaggctggaaaatagaaacggtctttatttacttttttcaaaatgttctttcagtttgacagactttgaatccagctatgcctaccagattatggtggatagatggagtgcacatggagtccgactcgtaaacataaacaatcaaacataaataaactggtgcgtgtttctcatggaaaatctaaataaaaagggggacgtcatgtgaccccagcacttaattagatacatttatatggtacgagacacggtgggtgcaaaacgcggtttctggctgtgcctaactctgccaggggccgtcggacgtcggtcgcctgtggaaacaatagctttgcctgtctatcagagacagctcatgtattggccattttctatttcactttagagagtttagactgacgtctgaacccttgcttggattgtaggtcgaagaccgcacagtctaaaggtcagaagactgctggtagccaccggaagagccacacgagcaaaagcccgtattttggacaacgtcaccatgaaatgtacggttctggtcagattgcgagtctgctcgttctctttgttgttgttgttgttgttgttgttttcgatttgtggacgagattccagtcgctgcccgtccatcccaccttatcacatttctcatatgttcacttatgcacttacatgtcccccaagccattaatcaaaacgacgcgtctttgtgctcgggtggtagcgccgccgcattctcccagcccaaagttggaagatggtagcgcaggtttcgaatccacagtctccctagtactgtaccatctctcgcattcccgaagcagccatctcctgattgtgaattgttctcaacgtcgatccactgtcgggctttctagacagttttcttggcggaccggcacaagcaccgaaagtttcttctccagattgcgaacatctctaccaatgcggagaagaagttcacgaaagtgggaagatcgtgaagatcgcgtcagagaatgtggagattgcgagctcgaccgtgcttaaaggtgggcatttgctccagtaggaatcttgcgatcccgttcatctgataatcctgtctgactcaggcgcttgcctgtacgcttagagactataacggggtctatggtgtgtatgagttctaagatgagattcgattagataatgactgcacagagcgtgcgatgacttttctgtaggtctgtaaattgggcttattaattctcgagctcctattggccggatccactggccgtttggcgactccaactgttttgtggaagtttgaggacgacactatagggcgcccagagaatggtagagccgccactgcaccgaattgtgactcctctcgtaagtcgtacttctttgggccagtttcgcacccagacaccaatagctagcgcttctttttttccgtctgaatcttctgttccgaattcgtgctgacatacgtcaaccctcagtaaatatatatatatatcagagacattgctgccgtaggtatctgcgaaaagtttaaatattccaccaacgtcatttttctcggatcacactacaatattgaaactgttcgctactaggctgttcataaataggttgttcacatatagtctgttcggtctcaaccctgccatttcataaaaaggtttattccatacacacctgctacactgaagagctcgtcagaactctttcgtcatttttctggtaaaaacgtattcatcacagttgcctgtttttgaaacatcatttattggtcactgtgacgtactgaacatattgtcatattcaattagtgaacaatactatcactggtgcattctgtagcttgtcacagccataccttctggttcgacttctcataagccaaatcgaaatttttcattggtctgaaaaatcattttcgatcactaatatatacttcaacatatattagctgccatcacattaatgcttctgttatacctactctattgcatctaaggtatacacatataagctctatcattacggccagtttcaactagcttctgctcaactactcgtttgcattatcctcaaaaatcagctagatttatcactgatactggacccaaaagtactttctcccagacgtatcctcctacatgtattcatccatatagcaccagttcatatatagctagtcatgtcgtccctaacagcacccgcgtcttctgagacagcgacaccagttaaacaggaggactcctcgacactcgagcacatccaggtgccgtccactgctagccttgtcactccagctacgccagcagcaccaacaactccggctacaccgacttcgtgtctgacggctgcacttgcgactgtaacatctccgcaagatggccaacaatgctcaaactgtggcactaccaaaactccactttggaggagggcgcctgatggaaccctcatctgcaatgcctgtgggttgtaccttcgttcaaacaacacccataggcccgtaaatctcaagcgtcctcccaacacgatacccataaccaaaaccgaagaaggatcctgtaaaggcgatggcagatgtaacggaactggaggatcggctgcctgtaaaggatgtcccgcctacaacaaccgggttgtagtaagcaaacgcgagaagtctgcatctacacctcccatggaatcgactccggccacatcaccacagccagaaaagagagtagctaccgatgtagacgaagactctctagccattgcctgtttcaactgtggaaccactattactccactctggagaagggatgatgccggtaatactatctgcaatgcctgtggactatactacagattgcatgggtcgcatcgtccaatcaggatgaaaagaacgaccatcaagagaaggaagaggaacatggcttcgggcaagaaagatgcttcggcctctgactcaaacacagaagacaaagagcctcgtagtccggaggacgctcgaaatacccatagtccacaattgaatactcttcattcccctactgcaggtttgggctctcctaatgggtcgactctacctccaatttcgtacaaccatcctctcctgagactggctcctccggtgtcaaactctcctacttcgtactatcctccatacacccctggaggacgtattccaaacggtccaggtcctctaccaggtcctccaccacctcaaccggcttcgcagtacggcttctccatcccccaaacccaccaaccacctttgcattatggaatatacaaccaaaattcggacataaaacttcctctgatccagctccacgaagctgggccccacagccggcaccttttggcacctatcatcaagaaagaagccattccgtcaatctctacatccaaatctgcatcaattatcccgcctgtgtcggaattcgtaggttctcgacaatctactccgggagtatctgatggtatcaaaaagagatcggcgtcttcaactccaattgcgatcgattttacgtcgactttcaggtctcctgctgcttctaacggtaatacgtctactatatctgatactaacaacgatagtgaaggcagcaaaaaggaccaccgcacgcacgcattgtcgattggaggcttgttaaatggatagaataaaactttattggtttgtacaatatatactattattagactacgagatgtaaactagtagctttcgcaacctttatttaagcgtagagtaagtttcccccaacaaagtcgggatacacaacttcactacaatcctaatctcacagcaattctaatcacgctatcattttcacgatacaaaaccaactctcgctttagaagagctataccaatcccatactaaaatacatatgtataccccagatatcagttatcagtcacgtgattttgtgcaattttcaacccattctggtgataacgatttagttaatggtgctagcaagcaaaatcttaaaaattgtggaagaacttgatacggctatcaggaaaagaaatagaaatttctaaagcaatagtttgtccatcttgtttcatatacggatatgtcggacgcggtagaaattgtcgatttgactccagctccggctgcaaacgtagaccattcgttaacaagaaaagcgaaggatatagcagctggattcatcggtggtgccacgcaagttttaattgggcaacctgctgatcttgtgaaaatccgtttacaaacgtctcacgagacatcttcattgtcgatcatcaagcaagtccttaagaatgaaggtatattggcattctataagggaactttacctccactctttggtgtaggagtctgtgtttctctacaattctatgggttccacgaggccaagagacaaatcctcaactattacgaccagagcaacttaaatctctggccacaaacatatattgcaggtgccgtggctggtatagtcaatactcccgtagctggccctatagaacaattacgtatcttgagtcagtcgaatacttccaccactaagaatagtctaagcgacaccgtgaaaagaatataccagaccgaaggcatagtcaatgggatatatagagggtttgggatcactttattgcgtgaaatccaagcctacggtgtctggtttctcacgtacgaaacgttgatccagcagatcatagacttgcaacactataaatcgaggaacgatatcagcacaccagaattgttggccagtggtgctttggcaggtaatgccttgtggttgtcgtcgtatcctatagatgtgatcaagtcgaacattcagtctgacaagttcggcagtgccagtaagttcaatggcagaatcagtgctgctacgagatacatctaccagacccatggactccgtggattctggagaggtattgtaccttgcttattaagagccgtcccttgtagtgcaggcacgtttgccagtgtagaacttgcgttgagattaatgggttagtgtacattagaataggcattcttgaacatagacaatttttataatgtgtgaaggctaagagtgtaatgctacgagctaattaacatgcatgtaaatatatgaagtacgtgtgaggaaaaaatgggataaacaaattcatttatacttcttagccaattcaagattatctgaattatatcaatcacaattcatcattgtcactctcgagttacttcgattagattctctagatatatgccattatactttttattacatacactccatccaatgtcttgatctgctgacgtaatcactgacaaacagtgagagccaataaaacttgaggattttcaacttacgctagaaaaaatctcaaccatacaaaacattaccagttaaaggttttgaaatcgctgtgctaattctactactgtttgtcgtttatcacccacagaggtcccacagtctacctatagaaccgacgaaatatactcgtgacttagacgaagtcatcctagccgtttcgtgtttatctgaattctgtagaaattcgaaattgtaaatttttctcatcacatatttcacatacaatgttcaagcaattgataacagcagtgcctagacagccaattgttggccaacgtttcatttccaacgcttccaggctctacaagccagcagctgccactgcagctgaatacttgactactggtggttctacccagtctgtctggcccaagggtttcagagctcccaagcctaagacttgggaagaaagtagcgaaagtgccttgagcaaggctaccaagttcttcttcttgtcggaaattgcaagaggtatgtacatctgtatggaaatgtacttcagatcaccatacaccatctactatcctttcgaaaagggtcctatctcgcccagatttagaggtgaacatgcattaagaagatacccaagtggtgaagaaagatgtattgcttgtaagttgtgtgaagccatctgtcctgcccaggcgatcaccatcgaagccgaagagagaattgacggctccagaagaacctacaagtacgatatcgacatgaccaaatgtatctactgtggttactgtcaagagtcttgtcctgtcgatgccattgtcgaaagtcctaatgttgaatactctacagctaccagggaagaattgttgtacaacaaggaaaagttgttggaaaacggggacaagtgggaacaagaattgcaatactgtattgatgctgatgctccataccgttaagtcgaataatacagactttcaccatcccacattaacatagcatttagttcctcaactacaaaattcatatatcgtcttgttgaagtcgatagatacactgtatcgtttatgtattctttttataatgcattttattaagtaaagttgaatttctctattgcaagtaaatgtagaagtgcagcgtatcagcacgatgtaacagttctagataggcgtatattacaacgcaacggcctgtcatcataatgcagactttagttgaaagatggctaaacgagtgttgccgcattgatctagtctgccccggctcatgtttactaataaccttgtactacatctacatgtttttatatatctttttattggtttcataagatcttcatataaaagcaaacagaaaacaagtgaaaagaattaactatccttaacaaaagccgtggacaaacaaaaatttatttcattggatgcaaaagatggaataaattgtctcattaattcaaatcatgctatcggggttatcatttatttcatgtcaaaagttgaatattaacgaatactaaacatccttctatatattggcaaacaataacaaaaaggaaatccaccattcaatgagaacttgacataaaatattgataagggcgatcgtcttatttcatatatgccatcttttggctgataaaaattgaatatcaaatattctgtaaattggggatttatgaataagttttaaatgactattcgttataaataaaattataatgaggaatggattggagatgaaaatgtgagatggagtaaagaagaccaacacgtcgcttattgcacttgagagtaaccagtgaatgggttggcgttcttggacttcaagtactcgtcggaggcctcttgccactttctgtccaaggtgtgtggtgctggagcacccaacgatctgataccagcgaacaaaacaatagaaagaaagataccaccaacaacaccatagacaaccttggccttgtcacctggaccgtacaatggctttcttggaccccattcaccgaacgagatgtagtaggcagccttcttttcggcaggagacaattcttgccatggcaattccattctggccttcaattcatctatcaaagcagtctgatcttgcttaggtaaagtggcccatctggtttctaacttgccgacgtaggcgttggacaaggctcttggggcagtcttgctaacggtagattggtgacgaatggctaatctggtgatggctggacgaaacatttctataaatgacagttagtatacgaatagtagtagtgttatggaatgctagagctgatgatacgattttataaaactgaaaattttgaaagattgaaggtcctgtacacagtgtcgttctttaatatgggtggtctcactcttagttacaatttgattggacggagaatcttggtagagggacgactacagtagtagaaacaaccgtacattgaatagtagtgtttgtggattggtagattgctaacgctgttgccattggcttgttcatactattgtggtgtagattgatagtgtatacttttgagtttttggaattgtttgctttgaaaaatgtgaaaactgacgtatatatgtgaatctagtgactacgatgacggatgagcacaattgttcagacatgagtaattatggattaacagaacaacatgtagagaataacaattctactggattggtctacaccagtattttatagtgatttgtttcttagaattcttatcccctactctaagactctaccagtcaaacttcctcatcattgcatcccactagggaggattgagtaacgatgcccaatactgccgggaactcttttattccgtgtagtttgattatacatactgattcttgaagctaactggaatacagataacagtgacttttgcaaagaaaaagctagtagctaatgatataaaatggatgggttggcttttttctattggaatcgtctgggtgattattgggttatcagctagaagcgcgggtcgtgcatgcggccagaatcaccctctccatttagtgagccccatagttagcgaagagttgcactataaagatttgtgagagaaagtcaggccactttagggataccaattgaattggaggctatctgatttgcttgtcaaatgatacgattgaccagctgaaaattcgtattctacacgagctttgcggcagggtgatgtttcaaacgatgtttcaagtccaactaacttcgttgaagaattctgtgttcactttcattgtacagtatttgtacgtagtaaattctgttagtgtgtattttgctactaaatgtgttggattagttttttgcaagccagcatctatttagactacttggttaggtgttcagtttgagtattacttacatatgaatgctattcagagaggaaaggtatgagttcttgttgagtaagtatttttctgtgttttactcggtgctttaatagtgctattacatagcattctttacacttttgagcttttactatttgacttttactattaaatatttgctattggcactctattgtgccatattatgtcatattctcttatgccttgtacacgatatcaatcatcgacctctttagctgggcatcgtctacctcctctgcttgtacagtaaacttgtcggtctttaccctactcaagtagtgcaagaattctatcacagagcctcctacaccaaagtagatgtttttggctgctatgagggcacgtccttctttagtgccagatttctcgagaatgtctacaattgactcagccactaatggcaatgtctctaacgagtagatggtttctgaacttatgatgaagtcgattgcgtatttctcgatcaactgattgaactgagtgccccacgagccagaaataaacactaattcgacattgtactcttttaaatcattaatgaatgtgtctatcaacgcatcagtgatcaacaactcgtcgtttttcaagtacggaatgtcttcgcttgtagtcaagtcatgcaaaagttggggttccaaagtggacgcccaatgaatgaggatatttggcaaactgaccaatctcaaaacttcctggttgaaatcagacaagatgactttgattggatttctgtttttcctttgaaatttctgcaacaaaagaaagctggaaggtagcgaagtaccacaaccaaaatccaaataggacgagtacgttgacaaaagcgaatctgattggataaacttagccaataagtctacagtgtcatacgaacactcccaactcttgaatcctccttcgtaaactctcttttccaagtccttgtcattgagatcaatcaagatttcattgatcttcgtattctcttgattgtcttctgtcatcacctggtgctttacatcaaaaagttcacgtctgtaaacaatattttgtccaatgggagttgtatagttgtcaaaagtcaacctcacatttctcaaagtctgtaataacgactccgttgagtgaatcactggtaggttctgtctctcaattgtagatgagaacgtacttaatgagttcggcaccttttcatttccattgactttttgataatcgctcaaatgggtgtgagacgactcttcaaagtcgtcatcgctgaagtcctctttagtgaacccgaaagaaaatgacattttcgcaaaggatagattcgtacctttaattcttcattgaacatttagagatgacatcttttagagatggggttctacattttttttgtcgcgcatttttgcgacaatactttatgacaaactttggattgcaaatgaagcgcaaaatgcgcactaaatagaaactatagcaaattaatttaacggaagaattagcttaactttttaaacgaattaccaagtaagggtgaattgcttagcgaaagcaccttctttggtatacttttccaaacctgtgacgaaaatagttgaattttcgtaactgaacttgacctttgaatcctcgaattcgacctgcttaggcttcttctccacacccaagatggtaatattggccaatggctgcgaaacattgtattctccaaaactcgatgctgtcaacagcttgctgtgagcaacaaagtcaacatacaaagattcttcaatttccaaagattccccatcgtcaaggtagagctttcctgaagcattaccttcattgtccaaagctacaagcaatgcaaatggattctctctggattcagcaacagtgtagcctggttcttgaagtggcaaaatgtgaccacctctgacatgcaatgggatgtgacccaatggtgcagccaaggtttcattctttccatttctgaagtcttgcttttcgtgagtgtaccaatcgtagtagacttctgagacaccagcacctgggaaaacacccttggtcttgttgacacctggttctaaaactggagtaacaatcaaggcatcaccaacaaacaattggttgtcgataccgttgtacttcttctcgtatgggaattgccacgacaaggatctcaagattggcaaaccagtaacatgtgattcgtgcaacaaggtatagtagtatggcaacaacaagtatctgatagccattgaggttctcgtggcatcagcaacagaagaccaaacgtatggttcttgagaaatggctcccaaaacattgtggtttctgtagaatgggaagaacgaacccaattgcatccatctcgagcacaattcagcatccgagtttccattgaaaccacaaacatcaactccaaagaaaggaataccagaaagacccatgctgaatgcctgaggaatagagaagtacatcatgtcatagtcagcattgttgtcaccaccccagtgacccatgtaatggccagcaccggagaaggtagaacgggcaataataaatggcctcttgtttgggaagatttccaacaaagcagcgtggatagccttttcttgtaagaatccgtagagattatggatatcatattcaacagtgccatctgcatgagttgcatttggagaaactgcatgagttgcaagatcatgatcaccttgggcgtggttgatagcgtaaggtgggtagttgatgtttcccttacctggcaacaatgtgttcatggagtcgattgaagcagaagagcttgatggactgggcttagaagtagtggctgtagcagcaattgaactggaaatagacttccattcagttgagttcgaaacgttgaaacctgatggatattgagtaacttcgcctccaaccaagaatggtggatctgctgggttttcaaagtatctgccagtaccacacgaaccaacacagaaagaactgacttcgttcatatcggaccaaataccatcgaatgggattctgtcgtgccattctttaaacatctcgttccaccagtcttgtgtattgttagcaaggaaatctgggaaagcggtgtaaccgggccaaacagcaccaatgtataaagagccatctgggttcttaaggaagatgtcagattcgttaccggcatggaagggggtatagtcattgtcagtttcattatttggatttggaacgtaaattgctgcatcgaagattggaacatagtgttggttgttcttgtgtagcttgtccaagaagtcctggtacttgtcagttgggtatctatgtgggtcatttgtgaaatccttgtatgagtccatgtaatcgatatcagaccagatggtttccaatggaatattgaaattcttgaagttggttactacatcttccaagtcctcgatttcacgataaccccatctacactggtgatatccaagagcccagtatggttggaaagctggcaatcctatttctgaaacatattgttgaataacatccttagggtcaggaccgctgaagaagtataagtcaataactccagaaagtgctctccaggtcaaagattgttcttcaaaaatgacttcttggatagcagatgttctccagtagacaccatgggtggtatttgaattgtatctttggtcatagtaaacaggatgaacaccgtaaatgttaccgtcgatagggtcaccaacatcgttagcgaacaaagtctttacagttcctggcaaactcaaagaaccatggatggactcgcctaatccagaaattgcatacccctttggcaaagtggtgttgaattgaatgaattggttggaaaataccaatggattaccatcagtggaaaacaaaacctctccggtagaagctctaaccacttcaaacgagaagtcatccgagtggtactggaagactaagtcagagtcttcgaaattgaatgaattgacatctccttcgatagttggcttcacaaccaagtcttcaggcaaaatgtagacatcggttaagtttgttggttcaatatgaacattcaaacgcttgtcagactggtaagtcaccgtcaagttcaaatgatcaaagtcataaccatagatattagtagcctcctttaactcgagaataccggtcaatcctcttggtgtggaggtaacattgaccaaagtgtaaccctttgcttcctggttagcatcaacagcagtatcattgaggatgttaggaacctgcttaacacctaaagtcaagtcattgggaactgttgctcgagagtctccacttgaggaggtgctcgaagcgacctctgactcagaagaagaaattgcagcaccaagcacagagtttgtcactccaagagcgacaaccgaagattttattaagtctctgaatatcatcttgtgcacactgaggatgtataattctaatgggaatatacgtattacttaggaattggtcgactatttatattttgccatcaccaccattatgttgcggatggcacggaattcataaccacattcctctgtctcctatacgagtactagacgcaagcagttgaaagttgtctgttttggatcagtggaacaactccatatgtacctgaaatttcggaacaattcacatatataataatattattatgcataaaatgtgtctaccaatatagtggggaacccaaagcccacacaagctgcgcaagcccccacgcaattttaatccgatccactcctaggatggctacttttgatttatcctacaattcttggaaattatctatctggcgtactgaagtggctcattggaattggagaaatatacagattaagtttggtttgacaagtcgacgttcaagttaagtatcatgcaaatgaaagtgtcaaaaaagccgtaactgaatatgaaattccgagattttcaaacatggggtaactgccgggaggcggccactagcacagtttcctccaagatgaatatgcatttgtggagtttgtcctattgttttcttcgcataattagagcggagcgcggataaatagtctactttcattgtcgcaataatcttctataaagcgaagtggtccaatgggaggatcacactggtgccacatgaaagtagatagttagacaatagagcaatattgttcacaaaaatccgaaataggggcttcgtgaccagaatggatagtagtatttatgcataaattgattttttgacaattcttgcaagaggaggccgtggaacaacctttccattactattttccatcttgattacaaagcgagatctcaattacaattgaattttaacttcgcccgaaataagtaggtccaagactttgtttcgccaggcacttccggactattgcgaagtatctgtcattatagacattgcacttcagttgattattgtctaaatagctataaagtaggtctcagttctttagaactataaatctctgcagagatttaacagcaaaaacgtatttgcttcatttatgtgcaccgaagttgtctgtctatctgcaaattttcattcacttttgtagttgaaatatttgcagaatcttccctcgtgatattaattattatgtagacatatggttatttgaaaagtggttcgttatttacgtggagtttcgcaacctttggccacaaaaaatattagcagaataattgccatataaatttttcattttaagtttcattatatttcaaactttttgaatgctttcatgggaaatctacaagatgtactctaaattagcttttattctagatcctgaaaatatgtttcctcaaaatctattcgaaaatttatgaaaatgtagaccaaaaatacatacattcactgaaatcatggaaaatggctataattcaaagacattaacttcttgaacacaaatatgatacacaaatcattgccacctctactccaataaggcgcttgaaaaattttcaactcacccttattactttattctcttgctactcttttgatctatttagtcaatatttcgcaatcgagttgtgtaagtgactgcacacaagacttcaaatcagatagaatgtagtgaaggacatctaccaactagtcacccatccctatcactactccatactcttatccagtttacaaatttcgtccatatgactcaagtttcaccatcgagcaaaaaggtagatgatttcttatcggggttgtctcaattgtctcagaataaaattcgagaagacgaacaacgacagagggagctacaaagaagcatcgaagagttgaagagactgaattcgacttcgccagcaaaacctgattacgatgagctaactccggtgaactcgctgatgatttcagactcagttccaactttgaagttcagcagaagctcagggcccactgaatataaatctagactagacatctatgaagaagagaaccctccaaagctaccaaaaagaagaaatattgaaagtaatgaagatgaagatgctccaaaattgccaagaagaccagaatctacagagcctgtggaagaaaaccctcctccacttcctacaaggaaatttgcatattccacatcagacttgaatattaacttgcttcaaccaacaggccgtaaaggtcctattcctgtcgcaaaaccaaagcagacttcgaatcactcatttccagaattcaaagctaaatctggttccactggaggcggtaccattaagtctttttcccagatagaagctgaaatcaaaaacagagatgtatcacaaacagaggattccaaattgaaacaagtccccccaaagccaaagtccaaacctagaatcagtgagacttctgtagttgtagattcggtagcaaaaaatgactggctttcttcatcaattggaaacaaggcaactgtccacacaacccagtcttatgccggacatgtagaaccattgaaacccacaccaaggcccaaggcagactggttgtcttctactttacataatccaaaaacaacagtacacacttcgcctgccaaagtaagcgttgactcaccaggagagcacagttctggtaagccaggtagcaaacctcctcttcctcccaaaattgccattacttctccctctaagggagcagcagccagctggctcaatagtgctgttagtaagaaggatcttcatacacattcagaagtggcttcaaaaccatcttatataattccgaagaagaagaatcaaaatgtagaagaatcagagaaaaagacacccgagtacttggaaaaactaggaaagttgcagaaaggcgaatcgttgaaaaccccagtttcaaaagctccattgaacaaatatgctcaagaagaggacactctaaagaacacgatcgcaaatctttcgtcttctaaaaaaccacctccaaagccattgaaacctccagtctcaaaatacacccaggaagagactgacttgctcaaaactactttggctggattgtctacaagcaaagtgccagttgttagggtttcaaaaccatcagtagaaaagtatacaaaaaacgaaagcgagcttcttaaatcaactatatcaaacttgtcgccaaacaagaagcctcttataccgactaagccagcttttaacaagtacgaagaaaatgattctcagatattaagagctcagatgagtcagctctccaacaagagcaaattatccacaaaacaggataataatataacagagggaatgtatgctcatagtaaactcaaaccagtggctccacccctcaaacccaagaccaagccggttgttgaacaacctcctaaacgggcaactgcagttgagaaaccaaagcccgtatcattccaggaccaactatccaacatcttgagagccaacacagtccctcaacttgcaggtgcttctagtaatggaatcccaacagctacaataattagccgttcaaacacagatcctataagggagaaaagaaaagatacagtaggtaatggtaagttagttcatcctggtaagggaagagcaaagggtccaaagagaaagcttcctaaatcgatgcagaaatctcaggctcaaagtagcaacagttcaaagaagtcggcgaatgttaaggaaagtgatccagtttccttaaatccaattgaatcttctgaaccaaaagaagaagaaactatgcttgcggtaccaaagaagaaacctgctcctacagtgaacaagctaactaaaccaaagcctgttgaaggattgaagcccagccggaacttcagtggggagattttcatataggagatacagacattcagatcgattctattcttttataaagaacaattatttgttttactttctcaaacgtagattggcactcatagtcgtatatatgtgaagtcgtaaatgtatgtacagtcaattttgcagatgaatgcgcatgaagcaacatccccaattaggctagttgtgtggaacaagaactgtgaaaaatgtaggcgagctaacagagctggctcgtacttataagtgagatttgaaacatggatattgaagactattgatagagtagccgttgctcgagtagccattgtgtattatagcatcttataacctgagggaacatctcgttatcatcttccccactaaactagtgtgatttcagaagacattaaagcgtgcggctcgcgaatgttttttcttccagaacaaatggacaacttttcaaaacagttatgtaaacattatatacgatccaacagtgaataattgttgcaagcgataatcctcgttgcaaacagtactgtactactagtctaccctgaaatggataaagttaccgagcagttggaggcatggaaggctgagattcctgccaaattggaacaggcccaaatctacttcaaccagttcaagcaatcgattccaaagaacgtggacgaactccagcctcacatcgactacatcaagtccattactcaggacgacataataaacgacttcaccaacttcaaggtaactcccatcacaatttccatcacgatcacgactttgacgacgatcttcattatctcaaagttgttttgtagatgctcttctgacacgaaaaccaagaaaaagaacaagaagcctaaaaagaaactctcgaaggcgcagaaggccaacaaggatatccaggccattttggactttgttgaatccgagtatgtgcctcagatcgacacatacattgtggaatacaagagcttgaaacccgaagagctcgagtacaagtacaactactttgaagaaatgttgttgaaggagttgatgaagttggacgaggtcgatgtcagtggcaacgatatcttgagagaaaacagaaagaaagtgataaaatttgtccaggatcaccagaagagattggacagattcaaaaaagaaagaaacttctaagatgagctttcaagacactgatatctcaatttagatatgtattgtattctgttaataaatgtaatctactatgaataagtagcgcaatcacttcaaagagtctattctagtatataaatatatatttctttaaataataaataatgtaaccttttaacagtattacagtatttagtcgatatactctatttcttgtttatcactgtcttgtgcgagtcgaaatcctggggttggattctggctcctctcttgactccaaactcaggaatggcaccgtccgaattaccaggaaacacgtctacaagtagaggcaatctatggcccaaccacaaggcactgttggtgtggtcttccaaatcgttacccgtttgagggtgaataagaactgacaaatttccatggtacaattgaaaccaactgagaaccttgatgaacacctcaggtcttctcacatccgcctcccagaactgcgttggatgtgggccaatgatcttgtcatcgggcaacttcttcacgatgatggagccattggctgaatcttcagggaagtcttcaagtaacttggctcttaagttgtcggactcggtaagcgactttgcattatgcgcatagtagtagacatggaaatcgtagtattgcaccggatatgtgaacgaaagtccgtgaaccgaggtggtggctacagagggatcgttttgtggaagatgggtaacgtactccattgctatatgctgaaaggataaaactcgaaactctaaaagaagaataaacttattgaccaaatttcgttcccaggattagccacttacctaaggggcgccgctttggtatagagccacaattgctgcgaaaactgcgctaccaacgataagaataatgcatcaccaaataccattctacaacaatatgctacaatataagtaataggatttgtataatatagatgtaaatactattttaaagctcctaagccaaattcaagtccttctgcaccatggtcttgcaaatagggtggtacttgtcttcaaatctcttgaaagtctccacagcaaactcgatgctgacactggtctgcaagagcttgtaacctggtctgacatacttcatacgacctacagtgcccaaccagtcagcaaagaacttaacttgttcgtccgaactagtgtagttcccgtatttgatcaacaattcattccaacgagcaagtacttcaccgttcttactggctgcatactttgggtagatagaaggcaactttctgatgagttcaggagagacatcaaggtccttaaatctatcagttaaggtttcgataaagagcatctcttgttctccttcgaattccttaacatcagcttcggagaacttgacttcagtttcaccggacttaacgaagtccacccacttttcaaccaagacgtagacttgatcagccaatgtagtgtcgaacttgggatcatcaggtaagccgggctggaacaaccacttctccaaatcaatggtgtccaacgcatctttcttacccaatggagtgtagaaatcatacaaggtctctatgaactgagcactgttaagcgattggtaacggaacttcttgaagtaatgcttgataaatggatcgaactccttggtaccaccgactttcgtctcgatgtgaaacaagaagttgaaacccttttcatatggaattctagaaaatgcatcgtcgggatcgccacttgccaagtcccataccaatgatgtgaacttgggatcaaacgactccacagtctctactaatgcattccagccaataatggcattgaagtgtctcacttgctcgccatacttttctgggttggctctgccttcctcttgggcttcagcagcagctatggctcctataattcgcctttccaaatacacagtccaaccttcgttcaaccaaaagtgctcccacgaacaattagtaacgagattaccggaccatgaatgagccaattcatgtgccatcaccttgacttgagttctgtccttacttatcaaagtgggtgtgagctgggtcatgttgggaatttccatacctccgtaggggaaactcgaaggaagaactaacgaatcgaatctcgaccattcatattcgaagacgatcttctcggcgatctggatgaaattctccatatccttctcaaactcccactgacagtccttcaaagatggctcttcagagtagacatcagatctgggaccaataggagccttgtggagattaccagaagtgatagaaactaagtatgaaggaatgggaataggctggtcaaaatggtatacacctgcttcattacttggctgcggtctaccagacatagtacacaccagaggcgatttagctgtgaacttgtatggagacttgacaccaggggtgtcaaaacaagggaacaaactacgagcgtgaatggcttgacattgagaaaatacatatggaccagtgtctccttgaataaactgaatggcagtacacttgtcggtggtacggaaatcgacttccacagtgagactctcattttcaccatcaattggaattaccaagggagagccaaaaggagctttgtgtggcaaaagttcgaaaacaacttctttaccattgactttagcagtcagcacttccaaaaacgaagtgtccaatacaaggcggttggttttggtgagtttcttcaaagtgtatatcacatttcctgaaatattcttactctcaaacgataccaggagcgacaaatccgtgtggacaaccttaaactctgcataattggagttggtgcacgggtctagctcgtgtgatcttttgctaatattctcaaactttgacatggctaattggacttttcgaagaaaacgaaattagtacgaattattcaattctacgaaatagtgccttctagtagataatttagatggtgaccagagtggtagcgccgtcactgtctcattgcctaaatgccttggatattttaaatttagtgccgattctgtcaaaggctcttcttggtgcaggtatttttgtgttcgaaagtgcaagagccgtttcatcgtttcataggcaactagactgtatgtgaataaagaaatataacgtatactgaaacgaggctattctatacaatgttcaaccggttcaaggaattgtccttatctatatatatatgggtgcaccaaaaatttcgtcactattagaatgtcgtatcaagttcgctttaaagaccagcggttgcggaagctgtcgtttcatgagtttcggcttctgttggtttcttcttcttcttgtctctcttctgactggcctcagctaccaactgttcaaagattcttgcttcctcgtcctcatcttcggttcttgttacagccgaaaacacttcgccaatcaatttcaaggcattagctctgtctattctctttttcaaaggtacttcttcatcatagagaatattatcacaaactccacgaatggtaccttggatctcgaatttggatcctgaccaagctgccgctaacactttgcccatcaagtacttttccatttcagccaactcttctggtgtgtgcttttcaggaatcttttcttctttagaattgctggtttttacatcattagcatctttgtctttagagtcttcggagtctttgtctcctttactatcttgatctgcttgctgttcgtgtagttcttgatccttctttttctttctgatgctctcgatttcttcctctaatttattcacctcttgctctgcggccagcttcttggcttcttcctcttctgcttctttgagtgcatggtattcattatcttgttgcatcttggagtattcttccatggttctctgcgcatccaaggctgtagaaaccgtggaaaaggtatccttgactactccacccttttctttgacagagtgccaaaaccctccccagccaaagaatgtctggttcttcaaaaagatcttcagcttggtcttatagatggagccaagagtatgtaagatctcaagtccaaaactttccattttcaacgactccgcttcatactgcaatttgcccttgaacgactgtgctacgtcgtccttcatgtcggtctcagtaaacaacgacaacttgtcaataagtttgttggagagctcttttctcatctcgatcttcttcaaacgacactcctcttcaaacttctccaactcttctttacgcttctgatcttctttttctttttcggtaagttgctttttacttggatccacctcctctgtatgttctgaatgcagtaacaaaagaggagctttatcggatgaattggtagtagaatatttatcagtagaactagtagtagtagaactagtagtattagaagtcttatttggagtattgtcggtagttgcatcatcttccttcttttcgtccttcttttcatcatcagtgtagcccgataattccgcagatttcgacaactcttgcaataaagtcaattcacctatccattctttgaaagcttctccaccaaatatcatggagaaaaactcagatggatcttcgaatccttccgtgggaatcgattcttgcttaccgaacttgtcatatttagctctcaacttctcgtcactcaaaacttggtaagcttctccaacttcttggaacttggcagctgccagcgggtcatcggggttcttatctggatgtaatctgattgcagctttacgatacgccttcttgatttccaacgacgtcgcattcgcttgtacgcctaataactcatagtaggcggtgtcaacaaccattgtgatgttgtaatcgaaaataatgtgctgtgtatttgctccttcgctgaaagagttatccagatgagaatctgagtgtgaaaaaagggaattcagatattgaaactaaaattgagaaataacaacaataacaacaataatacagtcaaattatagtcgcgatagtccgaatgtttcacggccctattgtaacaatgtctggatcttatctattctaattatcagtaaagaaaaggtcacagcaaatggaacgtctgaaagaaacagattttagagatgaatagaacgataacgcttaagtatggcacttttgttctgtggcaacatatggttgtgcacacgacccgagtagctgcgaaaaacgagagttgaataattttgtcttatagtgggactaagttaacaagatatgtaaactgattctgctataatatacttgacaagtaatatatgccccgacatttctgattggtcaatgacagctgatattttgtgattgctacttcgtgcttattctcgatatacattcgaaaatgacttcttcctgaggatatatatatatgcatatacgatgctatgtacagttatgcgtgctatgttctaatgggagtagtaaacctttctcaagtcgacaatcttcttacctctggaggcagccaagtcttcaatggacctctgcttagtcaaggcttctacaaaaccctgacaaaccaacaatgggtttctcgatttgtacactttacctctcaagtccttgataccagcagcttggcagatttcaaaaatgtttctgttgactcttaagccaaaacctgcaggagcagatctcatgaacaacttgacagcatggtatttgtattcaaagtctccaagaatggttctttcttcgtatctggggataggtgttaagttcttgacagcattccagtgggctttgacagcagctgttctgataccgtctctggatttaccaatacctaagccaatggtaccgtttctgtctcctactacagttaacacaaagaaattggggatgtttcccttggatgtcttcaatgacactctcttcattatgataggacgcacatacaaccctctgatgtatccagcatccaaaccggtcaacttcgccaactcttcagcgatttttcttgtggatgtggctgctgtttcttttctcttgagagtgttctcatccttgaaacgaagcttcaagtcagttctgtctggaccttgaatatctgggatcttggggtatggagtacgaccttcaccttggtttggatatataatgggttcttcccagacaggatctgtcttggaatagtctgacaatgcatctcctggtgctactttagatttagctctgaatcccttctttttcaactccaacacgtctctaggatcaattaacgactcagagatctgaatgctctgtaacaattctggtgtgtagtatttcttgaggaattccaaatgctgctgaaccttgcggttggtttctggctctatctctgtagcctttggtattccttgtgatttggaagattgctggtatattctggccgaagatgttaaacatctttttattattccggccgaaagagcaggctgaaacgtgctctttaacattatgccgtctcactgctgtactaacactgtgaatcctagtgaatatctagtactagacttgtacttgtagttctccaatattgtaaatggtaccagaatgaatttttttcaacatttgtcgtgcgagaaacaaatcaaaaaattgtcacgtgagcgattgcaaaatgtatagatgtaaaactgtacatatatcacaagaagcaatgatcaaataatttacaaaaacatacataccataagtaacattatatatagtgtatctaaactattctacaatttcgtaatacgctttaagtagctctaatatcagtgtgtatttactacttcattataggaaacttgtctaagtggtgaacttgattggttcgggatccgtcttttctttaagacctaaaggcttgacatcatctggtaggttttgagctctggctactggtgagaattgcaatttttcgtttgcctgttgtaaatggttgatttcttgtctcaacttttcaacttccttttccaatcttttaccaaagacatcgatgtagtatgtggcaccattgtaactggcccagataaagataaatgtgacaaaagctccgcaggcatgtttatatttgaaccagataggacagaataccatagtcaataactggtaaccgaattgaatgagagtgaaagccgtagtttgcatccacaagtacggcaatgaattaacaaacttgcctaaaggagtctttctgtttctctttttcaagtatgtgaaggaggttaccttacctttgtctatttgctctttctttctgattgtgatgaagtagtggtacgacacctgccataaggtgtagtagatagaggtccagaagataccatggacaaaattccagtgatcaatagaggctatcgcaggataacgcgacttgatatagtctggatctaactcatgaaccaagacaaacatagttataggtggcatcacgtggataaatgaactggtcgttttttctatagagtgcaacactagtgagtttctccatgtgatcacagcaaacgacaatgttcccaacgacaatgagaagactgatacaaacaacgttggcgagtgggggaatacccagatgaacaacattagcaatatgtttacgtaatagcacaaatcagccaagtaatactggaatgattgcttgaaataagagtagaatctgataggcatcaagacagcaaataaaacagtatggaaatgtgggaagtagttggggtattttccaatgacaaaacccgctgtcgctatcaagaatactgcgatggcatagaaaagcttttcggttgatgagctttgtaagttcttgtgaattctctggtcgaatttgaccaatctttggttgaaaacctcttgaatttttatgaagtctttacttctttgtctcgggttgtagatgttgaaagtttcttttgttttcagcttcatcttattgaatctctttttggtggaatcgcccacagtgtccaaattaaagccgaaatcaaagtcgttggcaaagatgagtttcgacaaatcgataaaggacactgaagtcgccgaatcgctgcgtcgaagctggggactctgtttgaaagaagacgacgacgacgagtagccgtcgtcaaagttgtcgtcgtcatcttcaattataactgagccatcagagttagacctgctggatttggcagagccatcaattgaaggaggcactgtgaccccaaaacttggagattcgcccgttccagtgatggaatccaaaatgtccgaaggattcgacatttcctatacatgaactttgttaacaccttcaatggtaccaataactaagacggttagcgatacgatgtctggccaagctagctgaagttgaaagctgaagtttttatcttgactgtcttgaagagctggaaataaagagaatatacgaggtctcttcctgtctggaaagatgagatagaagcttcgcgcaatagtttacaaacacaaaagcgtcaacgctatggggaataatcgtgctttggaaagggagataaagacgagaaggaagtgaagatgaaaagaaaactgagtttagaaatactttagaacttgatgatacaaagcaagaaaaattcgaaatgacaaatacccgataagacatacgtttagtctattaaacatgatccacaaccacgtgtaatcgcagcccaaataggctaccagtagttggaccgcgacagccacggggaactcgtgtggatgaaacgtctgacaattgttgggcagcacaagaggtaagaagtggcacttgccgtgctacgtggtaatatagattagtggcagtgtgagaaatacagcaatatatcagtaaagataaattgatccagataaacccagtcaaacttgtaggtgcaactttgctcagtaaagagacagtagaagagctggaagaattacggcacaaaatacagtagtagagaaatggcgaagaaatagtgaagaaatagtgaagaaatgtagtgtattttagtgaagctcttgaatgcaataaaatacaaattatctaaaataaattgaatcttgtaaattgtatggagagtcactgagaaatgatgtcaatggtaataagcatatgggaattatatttaagtgataaagattatgtcaccgtagctatatgaaagttgcccatttctctgtatctctcttgaatcaaagtacatccccatactgataaacggttcttctccagactttcagcttaaatccaatgtctcaatcctgtcttatctattagtttgcattaaaattagtatatagcgtatatatagtttcttgctattagtagtgcttcataaatcatgccttgatcgaatcatagttgtacatcttcttgttatttttgatgttatatttgtagggattcttctggttgtactggtagcactccaagatcaccctcttgacagcgtccacactctgctggctcaactggaagtgaaatgcgattcttcctcccatcaacttgatgttgttcttcttacccaactcaatcaagagcctgtcgtccatgtggttagcctttaagtccaagaagacaaaattggtgtccactggactttctaatgcaatgccgtgttggtcgcagaagtctccgacctgcttggcgtactggtgggacttcaccaacttggggaagttctgctcaatggcatttatagccattgatgtcacgataccagcctgccttataccaccaccacattgtttcttgaaatggttggccttgtcaatgaacttctgttctcctacaagaattgaaccaatgggtgcacccaacgacttggacaaacataaggagacactgtcgaaataagagcagtactcttcgatagaaattccagtggctgctgaggcattccacaatctggccccgtccaaatgcaacttgatgtcattttctctacaaaattgagaaatcttgcgaatctcttcaatgggcatgatgatcccatgtaaggtgttttcaagcgaaatcaccttggtaggagccgcatggatatcaccatcgtcgaaagtgacgttctctactacgtcttcaaatgtcaagtagtttccgttgctgggagtcacaggatgaaccattgcctgtgacaacatagccaaaccagctgcctcgtgcaagaagacatgggcacggtggtcacacaagacgctataaggaggttgaaccaagttggctctcaaaccgatctggttggacatggttccgctgacacagaagagagcagccggctttccggtcaaggtacacatcttctcttccaaagtcaaagtgacagcgtcttccttgtaaacggagtctccgtaggtgctgttggcgaaactggcttcgaccatggcccgggtgggaaccgtgaacgtgtcggatctgaactcgttgtgggtaacaaacgtttcttcgtcgtcgatggtcatcatggaaatgctatcttttgtactgcgctatataagcaactatcacttgctacgatgacaagtgacaatattcggaaatcaagaaagatgtgaaaaggtgtcgccgtttgtaatagtcacgaatcgaagagaacctgagctggatacgaagaaacaaacgatagaaatataaattttatatataatgtttccaccacgagatgactaaccgtttgcaagaaatctccctagataatatagctacaaaaattatagagacgcttaggaaaccggttcagccatatgcagcgtgttaagttgctcatctagccaacggcaacgggcaacgacccctagcatccacagcatgcatagactttctttttccagcaactccagcacagcaatgccccccgccagaaataaatttttcatacactcatctcgtttcgcagctaaatgccctaatggatttttccggctgatatatgccgcagtcaaaaagcaattgccgctttttcctgcccacagcacaatagaagcacgtcaggttccggaacaactccgttaccaagctcaaaccgcctaacggtttgtatatacacgccttgagattactgtttactctactctacaaaccgctggccaactcaacatttgtattgggagcagattaccccaaatcaaaaataaaatcacggccaaggtttccccaatgtctcctctattctgacccgtgacagagtcggcccttctccacagaagcagaaactggaagaagtcacgacccgggttgaggcgtccgcgccattgacttcgtcacttccccggaaatgttgcggcagatcgcggctactgagaattgctagtttgggcatttacttttaataaatatgtatatacacttaaaaactatcaacacccaccttcctctccgtcgactcttcactgacttcgctccacactcatggcttattaagtgtacgcctgagttcaattcactgtggttctgtctttattgcgcactgaattttcagaagccttcgatacccgagattttctctttctcactgttcctctctcactctacagtaccagctcgcttagacccactgtatacatagactgtcggccccacaaatgtaccttgtgttcaaatggcttcgctgtactcctttctttcgtctggaaactgagtttggctgttgttggcgaagtcgtacgagaactcatcccctccctgctgtacagagctctgtaaaggctggccaaaattgtaggcatttgtacctaaaccgttgtagagagcattggtagcattcgtagctccgggactgagtgctgagcctggtggattagagagatttgtagggaaatggatgctggttccaaacggcagaaagtctcctcccactcctcccaagttgaagttgtgtgtagtggcactattgtcgttcctccagatctggctgttgttggaaacacttctgttatgacccatgccaatagctgaatttcctgcaatgtcgttgttattgttgccgccaatgaaagaatcattcacgtccatccataacttactgctggaactaggagtcatcaaaaacccttgattattgtcgacattggctgtgggacctccatagttagcacgaggctgcaagagactgatatcgttggaattaaccgcattcaaactgctcacactatgattctggttagaagcaaaaagatctccaagtccaccaagattgttagcagtaccaagattattagtagttccaagattgtttgtagtaccaatgttagcagtagcaggagctgtagaaggtgtactccagacacctgctccacctaacgtagaagctccaatgattccagaagatactggcgtagttcctaatgcggcatggctcattactggagagttgtagttgtacaataacgagttgaagttgctgtcgtagttcatcaaaggctgagtattctcctgaataggagaagtgattccttgttgataagccgaatcatcgtaagggaaaccttgcatagtgttggcgctattgatgatctgagactgctgagtctgttgctgttccatcaacgagttgatcaaggtaggcgaagtcatcatttgctgatcaaaatcgtttgtatgcaaaagttgggtagagctaattggagattgaactccactatacaactgctgatctaaagtaggctcaagctgtgcactgacggtgtcaatattatggaagtggtcaccagattgattttctgcttcgtgtgaataaacttgcccataatggttatggaagttgacatttgcttgggtgctatttttgccgtcaatattgtcatctatagaaggagagaagtttctcttccctgagaatttttgtttcgccaaagcatttccaaagccaccaaattctatcgaagcttggtactccgacaatttgactggctgatagttctcgtcaagattctgtttcgcgatttgtaaagtctgatgcaacgtgacgtatctcttgatttcggtttgaaatgcttccttccagctgttctcaaactcctggtatgtattcatttctttcaatatgtcgtcctgccacgagggaacaatctcgaatatcttgtataaaatatcatagatgttcttattgatagagccatctttcatgaaaatggaggaagttgcttgtggaacaggtgaaggcgatacagatgaagaaggcgtgttatgagatgtgatgttgtcgttgtctttgacgtgagccgttacggctgtgccattaggtggcataggtggagtattgaaagcgtcaatgagaggtttaagatgttgaagtatggctgaaagttccttcttctcagcttgagtcgtctttagcgactcttcaacattatcattgtcctttttgatgttatcaatctcgctgttgatgtcgttaatttccttgtaaattttttgtttttccaaatcttcgttattaagaagtagtgagtttctctcttccaactttttgatcttattagtaagattaagtattttgctgtcaaacatttccatagaacttttaattgcatttagctggttagctagtttcgattttttaaacgttagtttgtccttagacttttctagtgattttacatcgctgtcctttttaagtttagtgtcagtttcctcatcgtactcttgcttgtagaactggtactctttgttgagctcctcgctttccttgacgatatttgccaggtagcttttgaactcctggttgactttaatcaattccttctggaaacaaagcaagtagtcgttgagaatgtccggatctgtgattttgtgaatatctacaacactgagattgtctatgtctactaaatgtcttttttcatcaccatccttgtgagtttcttcagccaaaagcttttcggtatttgaaatagtgatatcgctatcttcaaatttatcatcgtagatgaacttcaacttggagtccttcttgttaatcgtatgaacaaaaacagacttggactgcgatctgaagttggtcaacgaattaatggctacaatctggagttggtacatctgctttggtgaaaggttattcaatctacaagaggtggaagtgatagtagctgcttccttgccgttgataaccaaaacatagtagatgttctcgtcgtacttgatctcgatatcccaatggatgactatcagggtctcactaatggcgtcgatacaaagattgggggagtgaggaatttctatattcaaatcctcgattatttcctctaccggagtcttgaggatctggaaacatcggtacaagatccagcagatggaaggcactaaagtaattagtatttccatcatcttgaaggactggtactactttcctcgacactttacttggtgtattttggcctctgtgtggaaattgcaatttttcaaagtaaaagtttgacaatttttcaccatatagtttgatgtacaacctacgcacaagagacaaacaaaccggacagtgcaaaatttcaccaccgtaattttcgtctcacgtgactctattaaaatcctatattagtcgatgaaatagctgcagaggtggtgccctattctaagtatatgtacgattttgattttgtgtttcgcctacaagctgtcattgacaacaagaggttcaaactggcccaatttcaagttctcttcctcagtaaggaaacgtaagccaactacaagcaaaacggtattgaacgcacccaagaggaaaaatggccccaagatccagtagtcgctccataagccaccaactttggtaatgagcaagatcccgagacctccgcttaaactatataacccgctgagtgaacccatattcttggggttgtgggtgaggccactcaatacactcatgctggtgatgataattccgatctgcgacatgcctatgagactaaccatcacaaaacagattacagtatgaggatcgtaagcacctttggtggtgcttccagagatacaaaggccgaaattgccgattatgccagcgatagctgaaacaagtaatgtcttgaattttccgactctcctggagtcaatcatgtagccccataacggagacgatataagtgcaattgtttgtgctactccggttaaaatagccgagaaaatatacccgtcgttgcagttctttttgttaggaaagtctgtagtgttgcactttccgttcttgtagtagaagttgtacaccaatagaggtatgaatacagaagtggtgaccgtagttgatctcgcaacaaaagctccaatatatgataattgtactctatggttggatcgggagatctcgaatcccctggcaagtagcttaaaatagggcaatttttcttctggctcgtccagttcttctgttacttcactttcttctacaagtaacaactcagattcttcaatagtgttgggtttcttcttgttgctatcatacaagaatacaacgagaacatgaaaagctactacagcgaaggctgccacgatcaagtacgaatatttcaatccttccttcaaggtgagatcagggttactgctaaccaatttgattggcaaagtcaagaagaaagatacggagaagatagcacctaatccggttgaaataccgatgagtgctgaatactttccattctttttgtcttcgggatcattcaattcaagactatcgaaggcttgctgttgatagtgtctccagaagaggaacttctggaacgcaaagtccgagttggtgagttcgttgagcataaccgtaatcatgctcatacaactagtgactccaagtgcaaatatgcatctgaaaaaaataacatctggatatatgtttgtactgaccacagcatacccgaccaaactcaaagccaaaatgaggaaactgatactggggatatagcgcgtgccttgtatgcctatggagttcaacttatctgtcaaggttcccaccaatggcgatgatattatcgagacaagctcatcggtaaatcccaaagttccgatgatagcacctattttagcgtctgcctgtattccaataacttcacttacatagaacggctgcgtagaagagagaaaaaccactatggctacacaggcaaatccagtgaagttgaaggccaaaagattccacggtgtataattggcgttgacgtggtacatttttaccttcttgtctgcttctgctagaagaaacctgagtaaaataataatatcccgacttcgcactgtctttattttatctatttgatcagtgaagattcttgtcacgtgaatataatcaatagtagtcaacattaccagtggttcctaaattcctgagctaggagctttcttggtcttcttgcatctagatgaggacccttgtaaagtatctgtcgtgattttcaataccagcagaactaatgcagattcaatttgagtttgaatatttaacatttaatatctgatattttattatcacttgttgtaccttatttgtacattttgtagaaatgcaacccagacgtctttcaaagttttagattcaagtaattacagctatcaaggcaacattgttcgagtacgaaggtcggagattggatctggacgagttgcgcccgaacggataaaatataattagttgatatacttttagatatttcgtaaccggactttggtcattatccgagggctaacctgtaaaatgcaattccgtggaacgcaattgcaggtccacgtatctgttaacaatggctgcaaacaaccttgttcaatcttactaatactgatagaaggaagtcagcactccgaacgcgaagaatatgaatggaatatgttaacaattcaatttcaagaagtggaaatttccgaaaagtagcgtttggaatgttcgaaccttcccccagaccagcctcgactgagcccacaccagtggtggccaacgaattgagcccatctgttgttccttaatctagctggaaaaggcttccaagaaaagtacagattaccctattctagaaacaagaaagtctaatgaaaaagcaatcttggttaacgttgcatttctatctacgggtattcaacagtttatccgcgtgtattccgtagccccatagttaagacaaggcaatgcgtatagtcacatgactcaactagtcatcgcccacagctggaaaagcggttattcggtatatgcaagtcagggcggttgcgaaaaaaaggaacacatattatccaggaacggctaaacagaacattcgggaattggcaaattgcaaaatgaacacctggaattatttataaggcaattgctttgctgtaattttaaaaagattttacttaacaataatacaattgagcttactacttagcaaagactcgcctatatttgccttcacaactctacttaatcatgagtacatccaattccaaacacaattctacggactcactcgactcccttgaccaggctcggccttacgctcctagcccattcgaaaattttaacacagatgctcaatcggaaatctctcctataaattcaagattaagcggagtctcttcgcgtgaattgagaattacaaggacagaaactgtcaaatcgttgcatgaattgggtatgtctagtgacatacccatgcctgctataaatcacccaccggtggaaaatcccatcttcccagaagagtataccttggagactgaaacaggattggttcctgttatgacattgcaatctatcggaagagtgaaaacagtagaacatactgtcagaacacatcaagataactccttggtggagaaaagtgaagcacctctggaagaagatagccaaaagaataagttggaagcattagatcccgaaattgaattcgtcacttttgttgttggtgatccagaaaatcctcacaactgggatatgacctacaagtggattcttactttaacattggccatctttgtcgtgtgtgccgcttacggttcttcctgtttggctggtggtttgccaactattaacaagaaatttggtgtttccaccgaagtatcaacattgactgtctcattgatggtcatcggtttcaccgttggtccattgatctgggcaccattatcagagcaaatcggcagaagaccagtttactttatctcctttggtctctacactattttccaaattccttgtgctttagccccaaatattggtgctctcttggtttgtcgtttcttatgtggtgtttttgcgtcatcggcacttacaaatgttggtgctagtcttgttgacattcacaatgaaacaagatctttagcaattgcattcttttccttcgcaccctactctggtccagtcttaggtggtgttgtcaatggatttatcagtgtctccacaaaaagaatggatttgattatctgggttaacatggcatttgctggtgtcatgtggattatcgtcagtttaattcctgaaacttatgctccagttattttgaaaaagagagcaaagaaattgagagaagagacgggaaacccaaagataatgacagagcaggaagccactcctctatccatgaaagaattggtcaacgataatcttattagaccattgaagtttattgttgaagaaccagttttagacttgatttgtgcatttgttgccttgatttactccttattgtacgcattcttctttgcctacccagttatattcaacagactctatggttatgaggacaacattatcggattgatgtatataccaattttaatcggtgctggtttggcattgtgcacaactcccatccttgaaatgaagtatgctgcattatgtaaaagaagaactccaactccagaagatagattaattggtgccattatcggtgccccatttccatgcatttctttgttcatattgggagcaacttcgtacaaacacatcatctgggtcggtcctgcttcttcgggcattgctttcgggtacggtatggttcttatctactactcgcttaataactacatcattgacacctacgccaaatatgctgcatccgctttggctacaaaggtcttcttgagaagttctgggggtgctgcatttccattgttcattactcaaatgtacgacaaacttggcttgcaatgggcaagttggttgttagcttttatctcccttgctatggtgtttataccaatatcgttctacaagtatggaaaaacattaagagcaaagatgtgcaaggaagactactcggcagttcatttatagaatccttaaatttatagaaatacttatattcaacacgaactttttagaaagaaaaattatcacatagtataaaaggaaatgtaacgaggagaataatcacaaaattgggaaggtttaagcaagagtaacattttggatcttgtctgtgacttcttccaaatcaataccagtgatggacttgatgaaaacactgaaatctgtgttttcgtgagtgccaagcaatccatctttggtgttcaagattttttggaagagaataggagaattggagtacgagtagatatccacatcaacagcagtgtggtctgtggaaccccacgaaacctcagatctggaattagttaaatttccaattgcaacttgaagattttggtcttcatttctggcaccattaacaagtatgtcaacttcttcttgggtgtagttagtaagccccaagccttgctcaatgacggtttgttggatgaactttctgaactcatcatcattatccttctgttcgaattcatcaatagcattcaccaaaaattcactagaatgagtagcattcaagatggcttgatagtcctttggagatctgccaaaaacagccaagcctccagtttcgtgatcagcagttgcgataacaatagtttcagtttcagattcttcaacaaacttaaggacttcggttacaacatcatcgaactccaaaacttcgcgagcaatggatggtgcatcattaccatggccagcatgatcaggtctagatgcttcaaccaacaagaagaaccctttttcggagtcttcagtagccttgctcaaagctttcaatgcgacttgtgtctcttctactaaactagggtattcagaatcctcacggtcaattctgtatgggaaatctttatcagcaaataatcccaacaatggcaatgtgacattgtcaccaccttgcaattgatcaaacgattctctgtctccgacatagctccaagttccgttggtttgaacttcttcgatcaagtttctggaatccttacgagcaccaccttcttctgttgctggaacgaactgtgctctaccaccaccaagaattaagtcaggaattctacctaatggatggtcacccaataactgttccgcaatcaatggttcactgcttctatctatggcatgtgcagcccaaacagatggagtagcgtctgtgaccttagtggtaacaacaataccaatagcataaccctgcaacttaagagcctcaccgatagatcctactggctttccttctgggtcaacgtttatggccttgttgtaagacttgaaaccagttgccaaggccgtaccagcagcagcagagtcagtcacatacgaggagttggacttggttctgaaagtaccaatcaagtagttgtccaattccaacaagtcgttgtatggaaggtcgtcacgtacctgtctaaacgatctagccaattgaactgaagcagctcccataccatctgaaatcaagaagatgatgttcttcttggtctccttggagttgtcaacaggagcagcaactgtaacatcaaacaagtataagtaaaccgctaaagcaaggatcgagaggttgcaaatttttggaaagacaaagttagccattttttgaaagttgggtaccaaattggaatctattagtattgatgttatttgctaattgtccacaagttcaaaagggttttcgtcttaatttatagtgcaaaatattctcctattctggaggagcttttattgtggttccaaaatgggctgcaaaaagtgcgaattggttgcaacttttgtccccccacgcgcaccacttccaagaaaatattcaatatttccaagctgtaaatgtgagtttcagcttttgctctcaaagctatttttgtagacagaaactgtggagaataatatcctcattatatcagtttaaacttgcttacttgcttgtcagttcacgtaaattttttgtgtaggttggaaaaggcaatttctgctaccatgacttttgttcgcagctttcgaaattatcaatttaataataaaatgcttcattctcagtcaaatatggaatcggaaacgttttcttccaagactcactcttgacgactgtgccgtagacaaagtattatcacactgttccttggacaagtcttttggaacaaatttcttagcatgtccccggaagtaagttatctcggttcttctttccgtcccccctttcatgattcagtcgtcttctttgtcatttgaagaagatggggcacatggggactctagccacagaaagaattggtgaagttgaacgtctttggtataaaactgaaccttaaaatttcttagcattcagggagcgcctgcccgtttggaaaaaactttaacaagtattgctcggcagttcccttcattccaccaaataccatacatgttagctaagaatatttcttgtagattttttatagaaaggtaacaagcttttggaataagtgatagtaacaactttttaaaaaagaatatactggcagtgtagaaaaaataaaatagaaagtaacgcaagaataagatagagaaagggtatatatctattcgacagagatgtcttgcaccttttcagtaacgtcatctaaatcaatgtcagtgatggacttgatgaagtgtgcgaaatcggtgttttcatgagcaccagccaaaccatccttggtgttcaaaatcttttggaaaagaactggagaattggagaaagagtaaatgtcaacatctacagcactatggtccttggttgtccaggcaatttcggatctggcagcagtcaagttaccaatggtgaacaaaagattcttgtcttcttctctagcaccgacaaagattctgtcaacttcgtcttgtgtatagttggtgagacccaaaccttcttcaatgatagtctgttggatgaacttcttgaattcttcgtcgttatccttctgttcaaatttgttaatggacttgaccaaaaattcactagaatgagtagcattcaatatagccaggtagtcagatggggaagtagcaaaaacagccaaaccaccggtttcgtgatcagcagtggtgataacgatggtttcggtttcggtttcttcgacgaacttgaggacagcagcaacagtgtcatcaaattccaagacttcacgggcaagagcagaaacatcattgtcatgaccagcatgatcaggtctggaagcttcgatcaataaaaagaaccctttttcggaatcttcagtagccttgcttaaagctttcaatgcgacttgtgtctcttctactaaactagggtattcagaatcctcacggtcaattctgtatgggaaattgttgtcagcaaataatcccaacaatggcaatgtgacattgtcaccaccttgcaattgatcaaatgactctctgtctccgacatagctccaagttccgttggtttgaacttcttcgatcaagtttctggaatccttacgaactccaccttcttctgttgctggtacgaattgggctctaccaccaccaagaattaagtcaggaattctacctaatggatggtcacccaataactgttcagcaatcaatggttcactgcttctatctttggcatgtgcagcccaaacagatggagtagcgtctgtgaccttagtggtaacaacaataccaatagcataaccctgcaacttaagagcctcaccgatagcaccaactggctttccttctgggtcaacagaaattgccttgttgtaagtcttgacaccagcagcatatgccgtaccagcagcagcagaatcagtgacgtaagaagagttagactttgttctgaaagtaccaatcaagtgattgtccaattccaacaagtcattaaatgggagatcatcacgaacttgacggaaagttcttgccaagttgatgtaagtagcaccagtaccatctgaaattaagaaaatgatgttcttcttagattccttagcattatcaacaggagcagcaaccgtagcgtcgaacaaatacaagtagacagctaaggcaaggagagagaggttgcaaaacttggggaagataaaagttgccattttggtacaattggatctggaactaggcctgcggaaatttcaccctcataaactgtaaccaccagggtttcaggcgcaatttatagtgctgaatattcttcatattttcctatttcaaggagcatcctggaccaccttttactgtggttccagattgggctgcaaaatggtacgaattggttgcaactttggccccacgcggacttttaccaagaaaaaaaatcttatttcacaatttacccgatcagtcaatgcgtttctccttttagagggagctatttttgtaattacaataggctgtggcttagactacctcgactttccgtgccttagtacgtcttactgaaggcttagggacagctaactgaatctctgaattggggattgtagatattctgtggtcgcgaatggtgcatagcgaacctttattcgcagcctacaaaatcaagtcttacaaataatacttcattcttggtcaagagaattgggagagaaacgtttctaccaagacattttggcaaggaggtatggatattaggggcatccataccagacactggagccactgcaattttttcttagcattgaccggaagtcgatgttctgattgtttgttctaattgttcaactctatattcgtcgactacgccatcagttcgtaaatacggatttataagagggcacatgggggccagtggtgaattcaattggtcaactgatcctagaggaataccaataaagagataaatttcttagcatggaacactcttggcaaagttagaattgaaactctgcgacggtgcggctccaatggagtacgaatttaaaagctagcattaacagaagaatacatacaacaattctattagaatagcatgccattggaatgtggctatgcagtggaatgaagaatagatttaactgtattaaggtaactttatagtagtaatagtataatggcggtttctaaattttatgatagtttatacatcatgacagtttatattgtagaatagtaatggatatgagcgaacgaatgaatcactgaggggaaatgaacttattggtagagattgtggtgaaattcgtctgccgaatactgatctgcgccggctttctttggagaatgttcggtgttctgcaccaacttggtgaccttctgtaagtcgacgccagtgatagcttccaagaatgcaccaatttcaatgttctcgtggttacctaacaagccctcgtattctctatgggaataaagcttctttttgatggctggggagttggtgtaggcgtagatattgacatcaacagcagagtggccatgtgtggtccagccagtttgggatctcaacgaaaggatgttgttcaaaacatacaataatcttccttggtcgttacgcttgtcaataatctgcttcacttcctctttagtgtatgaagttatgcccatatccttttccaagacttccttggtgacaaacttctccaaagccttgagatcgttcttgtccttgaaagaaacgatcttgtgtgccaagaagtcaccagaatgggagctctttaacaaaacttctgggtaccagaggtagtctgggtagttctcggtgacttgtctagcagtgactaaaccacctgtttcgtggtcagaagtagaaataactacagtttctgtttctgactcatcaatatatctaataacttcctggaaagcagcatcgtaagccaaaacttctcttacctgggcagcaggatcgttgtggtgaccggcatggtcgattctagaaccttcaatcaacaagaagaaacccttatcggagttttcagtagctttagtcaaagcagtcaaagcgacctggacctgctcagccaaagaagggtacactttagagtcgcgatcgatgtcgtacggaatgtctgtgtcggccaacaagcccaataatggcaaagaaacgttgtggccctgttgcaaaaggtcaaactcttgtctattgccaacgtagttccatgttgcagcgtcctgaacttcttcaatcaagtttctggcgtcagagcgacatccaccaggaactgaagatggatagaagtggcatctgcctcctcccaagatcaagtctacagatcttcctaagggatactcgccaatttggtgctgggcaatcaagtcctcttgaaatctgtagtcagcatgggcactgaaggcagcaggagtggcatcggtgattctggtagtcactaccaaaccagtcatgtaaccctgcaacttcaaggcttcaagaatagtaccacatggttgcttgttaggagtgacaccaatggctccattatacgacttcaaggcgcaagaaaaggctgtggcgccagcagcagagtcagtgaccaacgagttgctggatctcgttctggacgagccgatcaagtacttgtctatggtcaagatgtcgttgatagacaactggtctctgtgctgtctgaaggatctggccaacgataacgaggcaggtcccattccgtccgtgaccatgaaaatgacgttcttcttcttgaagggatcgactttggcagtttcgctagatctggagctaccgaagaagaataagtagcccaagagagagatggtcacgaaatggatcaaaagcgataatctcttcttgttcttatcactccctttgacattcttactgttgtagacagacatgttctcgacgatttcgccgcccaaaagcgggtcactttccttctgggccattttcacttgtcgtatatattacaggtataaacttgagaagatggaagtcctgggaagcagagaatatcgtgtaaaacaggaaataaatatggaaatatataaatggttatggagaatatcaaccatcggcacgcgtgcgtcagtggagtctgcggcgtggatgtatgattagccaaatgcgaatgcagaatcagtctaattttgttcaacaataggccttgcttttgtttggtctgctactacgacaacagggtagagtgtttcttttggggggagtggtgataagcgagaaaagaaatgaaatcaccagtaaatccgtagataacaagattagtagtaagctgaagatatgtgaacgacttcatggcccttatatttcattcttcagagtgctcatctcatctctgtaagcaactgtaagcatgtattctatattgtactattggtactgctactaaagtggtactcaatacagactactcacacagtacgtatcatacactcgtgtgcctataaatacatatgaaactggtgactacagcaatccagttgttgaggagttgtagtcacacgaccgttcacgactaataccaaatattattggcttgttacaggaatttggaacaccttctgcatctctgtgcatttcccacccctcgtggggtgcaattttctgtcctaattaattaatgcattttgcaattgaaaaatgtttagaattcagccacttccacacctccactccttgtatcctcagcaatgcactttgcaatggacaaatccatgatggacaacccaacaattttctggaccaccacattgttcgcatgcaaagtgaagagtttgggcggcaagtaattgtcggggtcgtacaattctccaatctcgatgaggtgatctgcgtcaaaatcagcttggataagttctcctgcttcatggagagtatgctctttggagtcaactagaatcgcggtacctgtacttttaaattgctctattacagccaagtcgagctcgatcatgtgaggtttatatgagccgatcaacgagatgaacttgtggtactttggatcctggttgatatagtcgttcaagatcacaggtgaagtcgcaggagtacatccgattatgatagaactgtttcgtatatggccagtaaattcgctcttatccccttcgtacagaaactcgttgaacactacatcaggatgttcaaccctaaatctgtcacataatttttcggcattggccaacgatctgttgagaatatttactgtagtaattttctctttgtagaacgtcaagatcaacttgacgtgccagtatgcctgtgcacctacaccgaatacagtcaattctggaagaagctctacctcttcccagtcgtaaggaatcaccttggtgagacccgaagtgctggctaatgctgtgcggaaagctgtcaatgattttgcatttactaaagcattgagcgagccagtgatttcgtccaagacaagcacacatccttgaaaacccaaccctttggcattattcccggctcctccacttatgaccttgattccgacttcattaggagaaatacagggcatgaacaagtgggttgtatctgagtcttcgttgttgctcatttgcgcaattcgaggtgggaccactttgtctggattctgcttgtaggtcttcaagccctcaatcaaaacattctgaaatttggcaagagagtttttggttagattgctattaagatacgtgatgacgtcggcatctgttagcaacttcattgtttgcttttgtaaatatgtaaattttatagaagaatgggttgaagaaaattttcgaattgtggggcatgagtcaaatctaaataattcaatttttcgctaattatctcgctaaagttatcctgaaccggaataacctaaaattaattttcattacactaaattttattgattatcaaatcataaatcgtaaatttcgctactatacctacgaaaaccctaactatccctttgtactttgtaaaaccatctgttcttcaacccatctcaattgttcaagctcagaccattcgttcttgcgaaagagcttcataagatactgttcgcgaaattgcttgatatccttgagattctgaagaagctctacattctgctcctctccatcaatcaactcattcaagatcaagttttccatgctatttatcaaagaataatacaaggagcgagaactttcgttattggggaactcgctcaaattgtaaagttggtacttgatggaaatcttttttaaacttgacaagatcttagaactctttcctgctaacaattcatgtgagatagtttgttgaatcaagtcgttcgcacatatagataagaagatagtttggatcttgtttaacttgtgattctgtaagatgtgttttgctatattgcaattattctctgaagaagattcccagatcaagaaactggacttcaactggttcaactctttgatgtaatgaagttcgttgaattgcttaacatattcaaagttgaacttccacactattctctcgtagaaagatgcaagcttattctgttctatcaaaggcaaatactgactactgaagttctctcttaagttcttgataatgagcaacggtttgcgtaagtcatgatatttcttaagtaaaatgatgttgaactgggtgtagttgatatcttcccatctgatattgttattactacgaaggttgaagagatttactggagatttgtccaaatgcacaacattcttgttgaggatcaaatcggtcaagattcgcaaactcaacttattctgggagtagaaaagttccatcaactcaaagatacgtgtctcttctttgatagtctttatatatgcagataagtctttattgttcattgagtccaaacttgagtagttggaggtctttttgacgagactggaagactggatcccgagtaaaagattattgacgtagttctctgtgatatggttggtggttgtttttgcaggaagcttgatgagatcgtctacattgaattgttcgttcgctgaacccttcgttaagttgctgaataaggatggcttgaacgttgtggcggtggttctggactgttctgtggttactgaaggcgataataaattcaaggcatctgctagaacgacattttcaggatgcgtgtttttcgatttgttggagagcaatctgctgatggctctgacagccgacgtcgccacttgtggccgactcggtctggaatacatcgatgcgtgtggatgctctgacgtagatatgttgatgtatgtcttgtagcaaatggtttgttagccagatgatatcgtatagttgtgactggatggaaggtgcactgtgtacaggaaatcatcacgtgaaaacatcaacttctgggattaatgggattaccttcggaaagaccatatttggttgaagtctgcatcagcttcgggttggcgtcgcgatggcatgatccgtcagtttagaatagttgtgcagagattaatttcaccatcgtattcaactttgaggcgaaactagaaggtgatgtggcagcttagagtttgctaaaagaacgaaattagtgagtacagagaggcaaattctagcagaatgcatacgatacaatgcggaaggctacttcgttctgaagagagatcaccgacaatgtcaaaacaaggaggagatgcttcggatttatagctgaaagcggcatcaagcctgcagaaagaatctaagatatagcctgttacaggagttagcaccattgagtgaattggtaagattaccaatcaggatcccagcgatgaggtattcgtcgacttgaaacagggtagatagtaacatgtagatcgagtagaattgttgaacaaactagcctggtcactgtggtatggtatggctcttatggctccaaagggtatggcacagtgatggactatggcacggactgtatgccattctgtctaaaccaagaatcaatatgtctaactgctaaggagcagagcgaaggaggctatagcagttaataaaagacaaacaattgcggctatagaagttacaaatcaagacatatgttgacatagcttttatcaccatcctagtcgacacctaccaacctcttgttaggctgatagagccaccgtttgcacttgcttatctctccgcaccagtgttctagattgtggagccgtgcatacgagcgagttccgtttgatagaatatgtaaacagtttccgtttctgattctgtcacataatagatctccagaagaagcctaatcccatggagtttatgtaagggtgaaaccacttccgatttttcaacttctaaatttcagttagcatttatagtgttctgccctgggctctttttttctgttcaacattcgattctacagagttcgctgaattattgctgctgtctttttcactgtctactgcccgcagcctggtctgttccgtctcttgacttcatcgatcttctgatccggttatctcgtccattgatctgttgatctgttgatctgcttttttccatgacttccatgtcttccaccccctcgtcggagttcgaaacgcttttaccgaaacccataaataaaactcccatcaacccgaacaacttgaccaacttggaagaagccgtcaacaatgcctacgaagccatagtagacgacgacgatgactacgagaactccaccaatgaggatatagtatggctccgtgaacaaagaacacacaacaagactcttcactggtttaagcgtcccagtgtgatgatgatctccttaatcccgttcatattcgcctttggtaattcctctgccgagtccaccagacaagtcatcaccctaaaactctgttgcaactacttgagcaatggttcgggctcctgcaatccagcggaggctcagatcttgatgtccaacttgcaattggggtacagcatctcatcaggcatcattagtttaatagccctgggcaaaatgggtccttactcagataggtacggtagaaagttgttcatcgtgctaattctcttctgcttagtcttgggaagatcttctcgtttcctaattatgtacaacttcgactccttgaagttcgccctaatgatcctcacagaaatcacagctaacatctgtggtggtatcttgactttggtcaccctagccaactgctatatctccgatgtcgtagagcctcaccagagaatctattcactcggcattagtgtagccagtatgatggtcggcttgagcgtgggccctattgtaggaaacttcatcttgtcgtttacaactaatgtgtctcagaatatcatcgatatcaatacctctatctctcgcgaagaattcaaccctttgaaattcgagttggttatattcatttcagggttgttgtttgctgtttttgtcttacctgagtccagatctgaacgtgctagaagaaaatctcgctccatgtctcagtctctgttggttttgctcgaaactgaacagccacaatcaaaatggtcctcttttgcaagtggtgccaatttcatgaaacctcttcgccttttccttttgcccagtgatgtagtcaacagaggaaatccccagagacaaaagagggatcgttttgccgtcttggttatggtcattgtcgattgtatcatgtcatcgcttgctatttccttgggagaattgtatattttatatggaatctactcctttggttggaatcaaagggacatcggccatttgttggctatcacttgctcatcgagagcatttgttcttctcatattgtctcctattattaatcatcgtatccttcagaaattcttcggttttagggtgttgaagaaacaattggatatgatcgactactccatggccctgttgggattgtttgttgatgccattttgttgatgctgcttcatctcatgagaaccaccccgaccttcttcctcatcatggcatgcaacagtcttggttctcttattagtccgacattgaattcagcaattgttaagttctatccagagtccaagattggggagttgtttggtgccatcgctctattgaagaacatatttactcttttgggacctgtgctcttcatttcaatttacaaatacaccttatctacttggaacaggcctgacgtcgtgtttactttggcaggtgctatcttggctgtatgtttcatctcgttctacatagtcaagcgagtgatcaacttggatgcagacagcgaatctgatttccttagcagaagcaattcagttgtatcattctcagatcagttgagaaggtcctcttcaagttcaaaattgaattacaccactactatcacagaagaatcggctgcaccaaaaactacattgccacctaaaccatacacagaattgcatcggaaaagtagttttgttcacaaggagagaaaccttatatcgtgagtttacttcattctttcagttgaccacataacttgagagttctgcgttcgtaataatacccataagtgtaaattattcaaaataacaataatacaatatatatctataaatacaatacaattttacttaataagatacaacatatttattacctatgtctgtattaccgagtctcttatgtactgttaagagcagctagatagttgtagggctgaaattattcgcagtaattaaatgagccgcatggtgataaatttcaaatatggagaaataatgacactggatgctatcaagtgtaattactacttttgctctactttcactgtcgagagtggatgtcgcctttgtcatccttatatgtgtaacaaattgtcaggtgtcgttctgctaatttatctcaaattagtgtggaggttttcagtttgtttcgtcgccttatcattggtatttctagctgtagtctacttaacatctaccatattcgtcaattcgtacagtctaattgaagtaaactcagaatctgaatcgtcagagaataccacacaagtgtttgaaaagtcagcgtctcctttcccagaggtgagaagtcgtggccattcgagacagacttctgtagaagagtcagattacgaaagtgattgtcacatatcttcttcgttcctcgatcacaaacaattctaccagaacttgaataacagttcccaatatttgcgacgggatagtttttcccaatgacttgcagttctgaattacagatatactttccgcatgatcttattagaacagtatcccgatctaatgtcactaagaaatggtatcttgttggtttcaacatcaacaatatatacatagttgtccaagtggttcagaggaagtacttgaatctcaagaaattgcccccggccttaaaaggattagtcatcattggttccattaatgatgaagcaaacaagtacgatttgtcattggtttggtcagagaataccaaattgcctattattaagaatcgaccagatcccgcttttatcatcatattccaaccacccaacttcaaaaacttggaatacttctctataaaccccatcttactacaatctatgggaaatgaccttgtgaactttgccagtaacgagttatctgagaagttttgtagcgtggaacctaaaacaatcacttccaagaatcaaagctttatatcggatgacaagattcttcaacgaataaaccggatcgtccagtacagaatagaattgcggaactggttaggagaatctcatattgttaatttcgatccgtcgtcgtatgtagcttccagatcattgaagtcttttcttctcggtatcttaagaacggtaatccggagcttgcaaatgttgataatctggttgatctggataattaacttgaacacctttggctttagtcttgtatcgatatctaaggtatttcgccaacttgatttacgactcaaacaactcaattattttcccgttcagttcctcttttactacgaccgttcgattctacttggtgatctagaagaatccaatctcgtgaaggaattacaactcccgatcttcaattcgagtttaaacatcaacaattccaattacatcaacttgtacaactctatctggttgatatttaatgacatcttgtatggtacaaccttgtacagaatcataatcctcaactttgacaagatcatcaaatttttgcatacaacagtaattgaaggattccttttcaacaacttgatggaaaccattgcgtgggtatctataaagcacccggccggttttaagttgaataatgaattgggtcagttccttggagatttgtatacttggatattaagattctggaagttttttgtaaatgattttgcacagcagaacctagtgccaatgttgagaggtgatatagtctattcgttgaagaatttgttatttatactttgctacctcgggggcatatccttcttgttgggttttattattgatatcgtcaatcttttcacccttcatatctacttcttctactacatttcgacgaagatttacagacgtcagctacaagtcatcaactccttgtttcaattgttcaggggtaagaaatacaatgtgttgagagatagaattgacaatttaaataactatgaggataacaatgatttcgaaattgacagattactattgggtactttgtttttcatggtgttgatattattgttgcctacgatttttgcattctacttgttgttcttcttgatgtggctctcgctcttgatgactttgaaccttcttgagaacctacagattctcgtttcatttacgcctttgtttgttattctattaaagatgaagaattcaaaaagacttcagggaggaataaatttcagctacattgggtctagcggagccactagctatatcagcatgtccaacaagtcattgtcctacaatgaaatattcactaattatatcaaattattccgaaatgcgaaaaacttcagggaatcaatagtacagcactttttctcgggcaaggtcatctcaatcaaatacaataacgacttgaagtttcattacttaatgttgcccaaaaatcatgacaaaacaataaacatatggaaatatgttagataggttaaccatattaatagataattaattcgtactatgcagtacatacttattttgcacccatttggtggattggtagtattatttagatgacaagtatatttgaagggtatcaaagacgattgcaaatctctgagttcctacaatcttgatgggtctgctcatgcgtgtccttagagaagtggacttcttaggtttattaggcagagtacgtatttccttccatcttggtgagaatagatattggacaaaggacagagactagctgtgaagaaccttcagaagtaagactagacctggctatatactttgataagtggatacttcttctcctccaaaacgaaggctacaaagatcaattattccacattgggtttgtgtctaatagttttggagtggactctgttcctgttcaagagcaatgtctagggcacagccctagaaataccacacttcacgtgattgaaagaatggatttatctgcagttcacacaagggagcctttgctctccaacccagtcgcaccgttaacagtgcgacttaactaaggctggaatatcctgcatactatgaacacatagttaacatttccttcgcactcagtggctcctcactgtgctcagttagtaccggcacagagttttcatgaaaattttcatcagtagttaattttttttagcagtagaagaaataaatttccctcttgacctgagaagtctttattcaattaccaagaggatctaactaaagatgtcattaccagcttcctttgaccttactcctgaagacgctaagttattgttagctgccaacgttcacttgggttccaagaacgttcaagtatgtgaagattactgaactgtccctccattgatcgaagatgtgaattcctagaaagtaaaatgaaaagtaaaatagatcaacaagtccctgtaccaaatcaagtccatcgtaccagggagcctcatacatgtaaagtagacgggtcccaaatcgaaattgctccccttgtctagtccatattgacatctattgacgaattgtagattggaaaattccaagttgtataaatccatgaagtgagacgaaagttcaacaccaacgaacatccgaagaagaactaatgaacatcaaagttcatgtcattctgcctatcatacagagttttatccaatcgaaaacagaatgaaaaaactgatttgaaaatccttcaacgatagagaataccataaacgatcaatggaatgtaactaacgaattaatactaacatatttaggttcacaacaagccatacgtctacaagaccagaccagatggtgtcaacgttatcaacatcggtaagacctgggaaaagattgtcttggctgccagaatcatcgcagctgttccaaacccatccgacgttgctgtctgttcttccagaactttcggtcaaagagccgtcttgaagttcgctgcccacaccggtgctaccccaattgccggtagattcaccccaggtaacttcactaactacatcacccgttctttcaaggaaccaagattggttgttgttactgacccaagaaccgatgcccaagccatcaaggaatcttcttacgtcaacatcccagttattgctttgactgacatggactctccatctgaatacgttgatgttgccatcccatgtaataacaaaggtaagcactccattggtttgatctggtggttgattgccagagaagtcttaagattgagaggtatcatcccagacagaaccaccgaatggtctgtcatgccagatttgtacttctacagagacccagaagaaatcgaacaaaacgctgctgaagaagccaagaccaccgaagacgttgaagaagctgctccagttgatgccgacgaatggaccggtgaaactgaagaagttgactgggctgaatctggtgccaccccagctgttgaagacgctgctgccagcaactggtaattgtaatttattactttttgataaaataatataatcgaaacatatacggttcggctttttattattcattcactgtttaatacttattattggggagtataaattatttcttatcatctgcaaaaataaataaatgaaaaaaatgtatctgtataaaatctataatagatatggtcatctctttgtttattattgtatagttgtaccttattaattgatgtcatagttgtactagctgtagaattgaacccgttggtaaacttttcaaaatcgaatttttcagagtgagaactgctcagtttcacataataaagtttttcacataataaagtttttcacaaaataaaggatttcacaagtccgagtattgatttatcctccagatatactccgcctatgacgacatctagtaaccaccggccctgagacgtgatagaatattttatcgggttcctgataaatgttggaagattatgtcgcggatatagaggttcggttgaatttgatttctcattttcctaaaggggaaataccgatgtctgttccctgtgattcttgccaaatggatttgccgaaagttggagaatccaaaccagcgaagacttctttttcgatcaaaagttgtcagttggatgacttgagttttattttgggcagttgcataatcccgagaagtcattagaaaaatattctttgtatttggtgtaatttttaactaaatacgttatactatagtaaagcagagaatgactacagttttcattactggtgccaatggatttattggacaacatatcgtgaaggaattgatccaagctggttacacagtaattgggtcagtaagaagcaaagaaaaaggagaagctttgcaacggaacttcgcctcaaagcagttttcatacgtcgttctcagagaactcgagaaggaaggtgcttttgacgaggtcttgaaatctcatcctgaaatagaagtatttcttcatactgcttctcccttcgatttcaatattgacgagcctgaagaaaaagtcttacttccagccctcaacggtgtcagaaatgtgttgtcagcaatccacaagaatgccccacaaattaaaagagtagtctatacttcttcttacgcagccatgattggcagagaggtggacccagactttgtcacagatgaaactatttggagttctttcaattgggataaggtcaaatccaatgccatatttgcatatcttgcttcaaagacatttgcagaacaggctgcatggaaattcatggcagagcacaagacaaactttgaacttactactgttaaccctacgtacgtgtttggtccccaggcgtttgacaccggggtgaaagagacattgaacacttcctccgagataattggatctttattgaaattgcaggccgatgacgatatacctcagaaccaaggaggctatgtagatgtcagagacgtcgccaaagcccatcttgtagcattcagatctccagcagctattggacagagactcttggtgagtagttttgacagattttccacttaccaggttctcgaaataatccgtacgaatttccccatacttagggacaggcttccagttcctcaaccaggtgaacacgaggacgcaattgagtcctactgtaagatggacccgtctaaaagttgggcaattcttggatttaagcgcaccgaactcacaaagatggtaactgacactgtagatcagatcttgagagtcaaggccatataggcattttggtctagaacttagtataattttttagtctcaacaagaaattgaaattactttttcgtagaaagtataactcggatgaagtacccaatatagtacacgaacaggagtcttccgttccgtaattcctgaaggtgtggtttttcttggaaagtgtcaatcgctcttatcgaatgcaaccgcaattgcttttttgatgcgtttcttacctgcagcgggattatcgtgcaattttgtgacatggccaccatggaagtaacgagatattttcttcgaatcgtggcagagggaataccgaatgaagcttgacagacgctaaacctggattacccgaacagattgaccagtcgagtcatcattcttcggaccagcagccggtcccttactaaactggtaaggccgcacaacgcctatgcagtttcggctacgtgccacataatacactatgtacaggatacgggataactgaatctagcaacaccgaatccttcgcccgaaatccatcctctggtgaagctaatcatagaaatcttactataaatatggcattgaatcactattgggaaaatttaatcaattcatatcatcactatcacacacactcaaatctactcacaatcaaacaaaaaatgtctcaaactgtctttatctcaggtgccagcggttatatcgctcagcacattactgctaaattacttgctaaaggttacaaggtcatcggatcagttagatctgccaagaagggtgacgaattgaagagtctctttaagaatgagaacttatcctacgttgttgttcctgacattcaagcagacggtgctttcgacgaagccttgaagcaacaccccgaaatcagtgtcttcttgcacactgcttctccatttgtctttcaagtcgaggatgttgaaaaggaacttttgcttcctgcagttactggaaccaaggttgctttgacttcagtcttgaaccacggccctcaaattaagagagttgtagtcacctcgtcttatgctgctatgttcgccaacgaagatattcctgacgtcgtctctgacgagaccacgtggacggaattgacctgggagcaagccaaacaaaacggtttggttggttatcttgcttctaaggcttttgctgaaaaggctgcctgggattttgtcgaaaaggaaaaaccaaacttcaagttgtccactgtcaacccaacttatgtgtttggccctcaattattcgatgaatatgctactggccctgtcagcacttcagtggaactcatcaaggctgttttgaagttgcaaccaactgatgaagtcccatccgtacaaggacctttcattgacgtcagagatgtcgccgatgctcatctcgttgcttttgaatcagatgcagctattggccaaagaattttgcttcaagatggaagattctccaattccaaggtggttgaaatcatcaaggctaacttccctgagttcaaggacaaaattccagctcctaagacaactcacgaggaggaaatcaagagtcactgcaagctcgattcttcgaagtctgacaagatccttggaatcaagtttatcagcattgagcaatcgatcaaggacactgtcgctcaatttattaaggtcaaggccgtctaatctttgttttcagatacataaactatattattgcgtcaattccatatatttttgaaattcaattcttgtagcctcgtttcaaaatggttgcgaaattctcaaaagtaaattaagccacggagaaaaatatttttctgttcctgtgtatgcaattgagcttacccggatatccaaaaattttcactataaggaagtttaaagccagttacttttgtatagttttctattttgttccttatatttgattaccacggatcgtgacctgaaaaccaaaatcatcctagtcactggtttcgcttgcgtgcaaacgcagttcaactttgaacgggttcgttttgaatccgcttctgcgttgaaagagaccagctgatgccaattcttgaataatgcctagtatggacagaggtattctctggccatttagctaggtctatgtgttattcgtttctatattttgtttttaggatactgttttgttttgtgtgggttcttccaataaaaacgttcccggtttatcgtgttcttactattcaatagaattagcacttcatgcccggggtatatcgtagatgtagcgtagagagactagaagttgtaacgccggcggaagcgattctcggcagagtagaagtttagaaatgatctacgacagtgctaagtttaggtactttaacctgtgcttctcgttcgttcttctgcttactgctatggtttaatttctagtatacttcatctcgtaatacttgcgataaactcagttttcagtggaagaaatcattgcaacgagaaattgcaatcttgcaattgtttatttctaaattctcttatctcgagctgcaaagttttcttcctttatgtcttattcagactctcggcattatctggtattgttaaatgggatcgtcggatacgtcaaacttccgcttacataatctgcaattaatttggaatctacgcgtttcagcaaaatatttcccattaggtaaaaccctatattgtcttcttttctacctggcaccatttaagttcataagcaggggagtttttcttttccagaccacattctctcagtatacaacgtcgagatttctttagcatctggtgacttttcgtttccaagtgttgctcagcattgttccccacacttcgttctcgtctagtatttacatttctgcactgtttcgagattcaaaataatattggtatctaaatttgaacggccaattacgaagtcacagccgactctgtatctgttcaacattcaaagttccgaaatagccaaagctgtgcaaagcgatacaaaattctatatctagaaagtcgggccactgatcaaacttttactatcaataactccaacagggtttatttattttaacttgctagaattttaataattagcagaatgagcttgcgacaaaagtttcaggaattcatctattccatcagcaccagtgacaagtattcggagtttgactcaagaaagtcgttcaacagagtcaacaaaccgggcccagaatcaaccctcttgtattctcaccacaaccaatcgagtcatgaactaatcacagaaaacgatcttgatgacggcaatctcaacaaacacaatcttgatggagtccacgaagtcaaacttgcctggagacacatcaagaactggatggacaagtactcgccggacttgggtcattctctccaggataaatgtaccaatagcgatcttaacgacttccagaaggacttgaatatcaagttgcccaattgtgttttagaattttacaaattgaccgatggtcagtccgactttggcaacaacaccaacgaaatcaacggtctcatattcggtcttaagctcatgccattggatgagattatggttctgactgaaaactggagaaaggtagcaagggtcttgaactcagagttgtctcaaattaagcaagccaacaagatcagcgagttgtcgaaattgcctacaattcacagcaatcaaaatgcctacaagaagaagttgagtggaagtggcggcagcgaaacttcttcaactaagacgtcttttgatttagtagactctttctctagatcgactcgttcttcatctgtatccagtgaattatcttctggttcaaactctcaattaaacattccaaaacagagatgcatccctcccggggccacccatgagacatttgctcatcctatgtggattcccttagcaaccgatgaggtaggcaactatgtgggaatcgacttgtcacccggtgctactggtaaatggggacaagtgatcttgtttggtagagatttcgacttcaagttcagaatagccgacaactttggcgatttcttgttgatctttgccaacgacttggaaattggcaactgggagcttaaacgagaccggaaaaacaactatggagacttgtttattggcaatgagggtgaattggtatacgtagataaaaccaccaagttggaaataccgtacttggaagttttgagaagacgggctattgagaaatggctctcttcgttagagatttcagagaaccttacacctgagcttgagcagttaaagcaagacttgactgctaaggatcaaactttgacatcgttcaataagagcttaaacaatatcgataagttcatcaacaataatctttctaccatagacaaccttgacgagccatcgaatcaagatgaatcatcagaagagatcgagccagtttcaaaacaaagcgcatttaagaaaccaaatgtgccaacactacaaacgaagaattttaataaggcttcttcaaatatcaagagtcctctttcacacgatgtgacaaaggatttgtacaatgaagacgatgatgatgttgaatcaaaggaaaacaggaagttccaagaagttaagatatgaaagttgcgagatttagatacagttacattttttagttcttatttgtattttattatttataattgtgatattaccatattattctctgaatgctacccggctcacttgcccatgtaaactcatagtttaagaatactaatgtagtaacaacgtttatagtgtttaaccaaataaactccaagtagtgtctctttgtgttgacaggctttatgaagagtctgaatatcaccaatggaacaatgtagtatcgtggttcaaataatggcgaaggaatgatagtcaagcacactgcggccaagtagcacacaatggtgacaaatctcatgttgatcttatcactttgggacaatgaactaattatagaataggttgcaaagtggtataatggcacagctatgatgtaactctttggatggctaatgagtcgcttgaatatgtagaatgtataatgtctattatcagccaacaagaatggatggacaacagtaaaattgtctatgacgtattttatagcacacaaactcaccacattcaaaccgaaattaagaccatagttttgaacaaagacaaatttgaggtatctcttcaaacaatgaacatcaaaccatactggccaagtgaagagaacaataaatgtgaaacagtaaaagacttgaaccacgtgcaattggatttcgtgattctctttatcgccaaaggtaataccaccattgatcttgagaaaaatcgcaaagagcacagcatttattacgaatggaattatcttgaaccagttcttaaagaacagagatatgaacagcagtgtctgagccaagaagttaggactctcgcctctttttctgactacacttctttccacaagtacagcaagaatgaaggcgacccaaacgatatttgtttgtctgaaccacaaactcaacaaaccaagtaatccactgcaataagcctggtagtctctcacaggtttggacatgacaattgtaagtgctagcactacaaatactgttgaccatatgtcagtatagaacaagaaatagtaggtgaatagcaacggctgggacgctatgttgatcgaaaggtattggtttccataagatttcttgaaacgatgagcaattgccaaaagagcaaagaaacctagtaaattcactgatctcaagatatcgtagtttccacaatagtagttcgattctgccccagaaagcttctgaatggcattcgtgtataagaaccccaatacgtacaaccctggtggagttgtgatcttgttgtcccattcgtggaatttatgttggcagtacttctggcactggcggatatggaagtattcgtctatgtatgggttcttgaccttgagactgacttgatgatggacatatccgcagaatgcaactgtactcaatgttagcaagagtgtaatgagtctcttgcggactatggagccacccctaggtataaccaacgccatagtcggatatgaggcaaggctattatgactacaataataaatatagctggcaattaggaaagctaatgagtaaatgaatactgaatttttcagccaaatagatttaatattcgcgttgagtgtttactatgggacaaaaatataggcgccaaaatctgggaattgagacaggctgcaaaatatatctcttctctaaaagttaaccacaccaacaaatgcatatgatcttgtaaaactcgaagggacttagaagaaagaattacagtcgactgatatctgaaaagtgcaaaacagtacaaaataaaggaaattctggttctcttgtgtattctctcattcatattcaaagctacaaagaacaatgtcttctacttccaatttgactgggcacaaccgcctggtttccaactcgtggctagaaactaacagatatattccttcccattcatcttctctggcctatagaaatccaaatctacaagatggccctagtagccaatctctggagccagaggtagccagcatttccttgagggaagaccttcttttcaatagcaatagggatgtcaacagagtagcacactctcagattggcagacaagtaggcaagattccttcaaagaaatcccctgatggtgattcttaccaagaatggatagctgacgctcttgggttctcaaacgagctgaaggttctacaattcgaacacaacagatcccccaaggacaaaagcagaatgcagagagggggaagaagtcaagggtccagaagcaatagccatggctccatcgagattgcgggtccacttctatctacctctacttctaaggaagttatacaattattggcttccagtaaacttgaacaggaagctcccagaaccagacctgccacaatattgacggcaaaggatattctccaagctccaggattgagaaacgacttctacttgaatttggtgagttggtcaaagatgactaacaaagttttggtcggacttggaagccactcatatttatggggagtggacaataaagtggaagaagtcaattgtatttctaaagaaaccatcacagcagtatcttgttctgattccgagttggcaattatagctacgtatgggggccatatatatttggttgatatcgaacataacactcttcgttcgacatactacaataatgggaaatgtatgttttgttttgcttgggtgccaaactcccagatgtttctagcaggggatgaagatggagaagtatattcttttgaaatagacaagaacatgttctacgcattgagtttgaagaacaaagtcaaatgcaatctgcaacagatatgtggtaattataaacctatacccattacaatctagtacagggaaaatactgacaatacactaggaatggccataaattgccaaggaacggaggttgctataggtggaaacgataatcgttgctcgttgtggcagcttcttcccactgcagaagtacatttacgattcattcttccacacaatgctgctatcaaggcaatagccttttgcccgtggacaagttctctattggctactgggggagggagtaaagacagaaagattcgcttctggcatacaaatagtggaacgttgctcaaggagttcagcactagtggccagatcacttcactagtatggtcaagtttccgcaaagaaatcactgctacgtttgggtttggcagcgagaagaagtcgtacctaatgcaagtctactcatatcccctgatggctacgcttgttgaagttccagctactcttaacttgagaatcctttcttccacactcagtccagacgggacctgtttgtgtgttgcaaccaatgattctacgattcgtatttacaagctctgggagaaaacacacaagttggtgaagtcgcccgattcgctggggtatggaagctacgggagctcacttatagatctacaagaaggggtggtcaagcgtggtgagaccatcagatgaatgaaattgaccggaaaagtataagcaaacccgaccacactatgacctttccaagaaagttgtaggtgcaaaatggtgcgcagcagtttttccgcagcaagcggttaggagaaatttcccaatagagtgtgacgtaatgcgcaccatgcatagaaaaaggatagcattgcccctcgaataggatgatatattaaaggtgatcttttggaattttcagactctctttgatttactgttgtgatttcaaattttgttctacttttttttacgctacattcataatagtttttactccgtcgcagatatctgtcgctttcccatatatattacatctgaaacatgtctgttccgttaatcaatcgttccttgactacaattagaaccgagctcgagttcttgaaggactctgaagtcatcaccgaggaattgtaccaaaagttgaaccagagccttcctgcaaaattcaccaaggatatgaacgcttggggtgtagagaagctcggcttaggtaacaacaacaacaacaacagcaccactactgccactgatagaattgctgaagatttggctatgactactatttcaactccttctcaaatcgaagctcccccacaccctccacgctcaaactccaccgctaagaatattggttactgtaaagtcttatacgactaccgtgcactggaagcggacgacttggatctcaagaaggaagaccgtatagccatcgtccaacacttgtcacctgactggtggaaaggatacaaacaagattcgtctccagaaaaggcaggggtatttccttccaattacgtagtggagatcactgagaaggagttccaggactctttcaatagggcacctactacagttccagaaaaggcatcatacaaaccacaaaacaatttgtatcagcaacaccaaatgcctcctccagattacggttctccatatggacagcctccagtgcaacaccaaccttcatatggtggatacgctcaatatcctcctccttcaactaactactatcaacctcctccacctcagcaacaacctcagcaagttcaacaagttgaggttcaaccacagtcatcgggagttaatgctcatcctcatttgaagaagtttggaagcaagttgggtaatgcggctatctttggtgccggtgccacaatcggtagtaatgtggtcaactccattttctaataagtatatagtgatgttttgtgtatgctagattaacaattttcaatgcaaagtatttggtttacgatgccagtattcgaagtattcagttccataagcatcaatactagacaaagtatttatttgaagcataaagtagtccaagctagttcacaatatatcatactgctatagcaattacatgctgtttatcatgaaatgttcatttttctatgtacaatggttcgaacctgtttatttacctcatttacgactatccgtcacagtattcaacaacaaagtatcgttatccaacaagattctgttaggcgaattggcaaggatggtggcaatttccctggcagtgtccaatctcttcaactcaacgtaatccttggatttcttgattgcttcaccaatcaactcggcagatttagcttcaccagaggccttgacgaccaattgctgtttttcctggatggccttgtcgactacaaaggcagctctttgggcatcttgctgggcaatctgcttagcttctactgcagcactgaactcaggcgaaaacgtcatgaatgttaaagaaacatcgtctaagtcaatattgaacttggcagcacgacgaaccaagttgtccttcactaaacgtgaaactttttctctctgagtgatcaattgcgatgcgttaaactgggctacaacagacttcaacacttcgttgacaatcgaaggcaagactttttcatcataatcagttcccaacgttctaaagattgtaggcaactgcaagatgtcaggtctgaacaacactctgcatgtgatgttgaccatctgcaaatcctttgtgccggttaaagaggcgacgtttcttggtttggcacggacatcgtagatgataggtctctggaaccaaggtatgacaaagtgagtaccttcagggtaaatacgtggttgcactccaccaatacgagagtagataatggctctctgaccaccgtcgacattgaaaagagcattttgggcaacgagagaaacacctcccaacaacaataacccacctactccagcgaaaattccaaagggagatctgggaggtcctcctccagtagacttggcttgggctgctcgacgtcttaattcctgggataaattcttccagttctggttactcattattgactagttgagaattatggtgatagtttcacgacgaaatttcggaataagaacaagtaattgagaaaaagtacaagcaaggaagttgattgaatttctgtagaattggaaagagaaggttgccttcgttaaattgcgaatgtctaattgccattgacaatgtcgtttttaatggacaaatataatagtgagaatgcgacattgcaactattttatcttttgcacccatttattgaattgctaattgtaggatagtgattgttatcagacatatattctatgtaagagacattttgttgtaattacttattttgtccttctatctgattattatgattatcatctattaagttctcttcttctttgggtaccatctatccaatgcactatgtaaacgaacgactaggatggaacaccctcatagtcatgttttttgttatattctacaatcactctcttccaataccgtcttctattggtctggatagggttgacgcggaatatcttttccaaaaacaccaagaaaagaacaactacagctacaacaaaactaggagcgatcaaccctgccaaaccagcttcactgacagtcctttgataaggacattcagcataaggtcctccagaaacaaaacaattactgacagtaatgtcgttgagatcgatccagacaggatatatagcctcctgaatccgaatggaattctgtaacgacatcatttctacactcagcgacggtaaactgaacctgtagccttcgggacaagttagatccttgtaagcttcaaagtattgttttttctcttttgggataatccaatcgttgggtgactcatcgttctgacaagcatagtgaagtgctctatagcagttttgcaccgtccagccattttcattcacagctacacattgatatgcaacttgtgaaccatccgcagaagaatcatagttcgaatccgactctgccaatgtgtaattggaattggttgagtttaaattgtacgagctaggagctctaggttcaccttttgcccaagaccagaacgaaatgggcatgaatgtgtctgctatagccagaatattcgaagtcagtacattgtttagattggggatttggtactgtgtagcattcaagataggtgagtatccacacctcaagtactgcgagtacgtgtcatttgtaaatggatagccatcttcatcaataacatatctgaaatgtgtagctagcgataatttatcgaatgtggtaatgttgaaaacgggagaagtgttgatttcgtcacagttagaaagcacttctgaattggagttggaaactatagtgctggccaaatccatgctcagaaagaacacagtactattatcggcagatgagaaggagtatgagttagctgacgagtgcaagtctactgttacgatgttgatgaaaatacgtttgaaatacgagaagagcaccgtgtctaacagtggaagggaatttgtgctctggttgtagaaagacgaatactcctggttttgcatctgtgaggttctgtaggttgccaagtccgacggactgaacacatacgagccgagcgaggcaaaggtgttagccaacgtcgagtttccaagagcattgaaagctggattcgaagacgtatacgtcgatgttgttactgacgtcttgttggaagttgtggccagaatagtctttaaattgatgagaagctcaaggaggttgacttccaaattcgtgtgagtcgaagaaataaatgatgcgatagagttcatcaactggtctacagttaatcccacctcgcaacggtactgctgtccgttccaatataggtccacgacgtcgtctaggctattagtgacgtttgacgggaacggagcgggacaaagctgccatatgtgggtgaattcgttccaataaagatcaagcatgaaagtctggactccactggatagatgggaaactacaacatccagagtcagcttgacatagccattggtgttgtagactaaagagttgagtgagattccaggagtcacaagctggtcgatgggaaccggcttgctgacatcccgttgtgttctttctgctactgtaaactgtgacgagtgttgtatcatgtctggagcatttgctgctccagccagcggtacatagacacaggataggaataataaaggtatcatatctgaaacatttggtgctgtttattagaggatggtatggggtgttatcagtagcacagtttcttagaatacgaaatgcagtggttcagtgatggagcttgtgaaaatgaaggtcaattcggtaatttagtaatttggtattttgtacatgattgatatttttgataaaaatgcgcactgtgaaataattgacatttcgcaactctggctgcgaatgtcttccacagcaagaagactatggacatcttgtgaagctagtgatttctgaacatctcaagtgagttagtgggttctaaagaattgttaactcggaattaaccaaacgaaatttaaaacgggaattactttccttattcagcaagctgtatatgacgtgaaaggtggactggactctctccaaaactgagccgaagcataccgtgaactcgtttatgttaccattcatcagcatgtcttcaactatttgacaagcgaaatcactatgataccaataaacatgattgcatctggtttgtttctcgtccggatttcatttcatcccaagtcgcaattcatggattttccccagccaacgcgaagagataagaatgtgtgaagtttaaatacacttgaaaactctagaagagtctttttaatttatacttatttgtgttataattccccagtttatgatgtgtacattttctaccattacagaaatgtctacaaattattcgctaaaacttgtgcattcctggcaagattttgataaccgtccaacagttaattggagtcacttctataaggatctacgatcttttttctgctcgtcacatgacgtctccgcaactccatcagatatcgccagatataaataaatttcactttacaactctacacttcctggtttggtagctaggtctttaggtttgttttttattccaagcgtcgctctttgcagggccctctccatcgacccgtaactattcacgctgcaagatgagcccgctgaatcttccgccgttccatgtgggacagcttctctgcggaggctttcagggaaccacggtcacaccgcaagcgtaccatttgatcgtcgaccatcacgtctcgctgatgattttgtcccgcaagaatgccttgctggcacaacagatgctgaagttgatcagagatttgcagtatatcgctttttcgcagggccattaccaatatccaatcatgtttgctatagacgaagaaggaggcatgatgaactcgctttttgatccagatttcttgacccaatgcccaggagccatggctcttgctgctacaggagatacagaacttgtgtacgagcttctgaaggcaattgctatcgagttgaagaacattggtttcctgattatattgggtcccgtgttagacgttgtcaccaagctctcacatcagttggtaggagtccgcagctttggaactaccatcgaagacgtgtctaaatacagtcaggcctgtgctaaaggattgcaagagggtggtttgttcactgtagggaagcatttccctggaatcggtaacgctaccgtagatagtcttctcgaattgcccatgattgtagattcattggaccagattaagcacttcaacagcttgccatttgccaaactcatcgagcagaatcttctcgacggaatcagtgctgcaggatgtggagttccgacaatctctccagacgaaacccacgcctgcttgtcgcccgtagtcataaaccagttgcttcgtcaagatttaaagttcaaaggttttgtaatctctgagtgtttggaaatggatgctttgtaccatctgatcggtttgggccaaggtgtcattcttgccatctctgctggttgtgatctagtcatggtgtgtcatgacatggctcttcagaatgaagctgtggaatgccttgagaaagccatagccaatggcaatctcgatgatgaaatcatccttgcaagcttaaatagaatagagcgcttgcagaagcgattgcctaaatggtcacaacttttccctagaggtgaaatttcagccaaggaagatgagatcaagttgttcaaatacgagcatcctgagttgtgggagaaacatcagaaattggcctcgctagcctatcagaaatctatcactcttgttagagactataatcatactctacccatctcaaagttcttgtcttccagtgaggacgataagaaaattgatcacattctcatattgtcacctttgcttaatcctatttatccatccactaaactgcacagcaaagacgaccaaactcaacagctctacaccggagaagaagtatttcagaagtttggcgatttgcttgctaataattcgttgagtaaaaccaaatcctacaacgtgttacacactacatacacagctaacggattgactcagcttcacgaactgctcattgaaaaatcgaaagtcgtcattgtcttaacttccgaagcttccagaaatatgtaccaaatcggaatagtcaaatatgtatcgattttgtgcggagcgaaccctgcttctttcaacaactcgggtgctacgtactttcaattggcaaagcctctaatcatagtagctactctgtctccatacgactttttctataacaagacgatgggcagtgcctatttatgctgctatgattacacgaacagtgctcttgaaaagcttgctggggttctcatgggtgactttgaaccagaaggctgtattccaggcgagaagaaattcatagggaagtctaagaagaggaaatcaacaggatcagtggaaggagtgagaatggaaaaaccacttctgatgaaaaagatcaagagctctacacccaagagaagatggttagtcgacgagtttgacttgaaccgtgactggactgggctccaaaaactctggaaaaacaatacagtagaatcagatatggcgactggaacgaatcacaacaaaattgactattcagtgcccgacttctacaagagactctacggactattggcgactactgccaagtctcagaaacattttgtggtcagaaactcttctctcaatatattatacggtgtagttttaacctgggtcgatgaaaacttacctcttgatggtgacttgacctcagaagaacagattagaggctcgatactctatatcttggtggacaagtccagaagattgcagagtattgggaaaaacctccatgccagagctattcggtatcttttgaaagagaggaaatgctctaccatcacacttggatcatcttttccgttgtttgtgtttcccgagaactctaacatttctaacaatcgtagcaactccaagatatctacgtttatgcagagtattggctgggatgtgaacgtcacaaagtcagcgaagaagtatgtaatgcaactaggagacttggacaactggctggtcccaaagaaaatattcagagagttgatgatcgttggtgtcaggttcgatatatgtagcgatcctgagaagctcatgaagctcattgctcggtcaacaaaggaaaatgaaaattccgacgataataaaggcatcaaggggctttatttggaggctgtcaaacatttgggaaatacctctccctatggtaccaagatcattattgcattggagcctacgaaccaaaacgtaattgggagcattgttctattcacaaacaagtcgcagttgtctaaattcttcccattcattgacgaattaaaggcagatgacgaaggagtaattggaggaattattggaccaattatagatccactgtattcaaacttgacggaaatcttcaaatatggattgatctgcagtggaatcacattccttaaatccaatttgaatgacggagacaccacaatgaaccaatgcatgatgctagatgttaatgatgacaaatcgctcacaggtataaaggagattggattctccgagtggaaatattattacgattactatgacaagaaaaacaacgccgaaaaggcatttcttgattgaacctttatggtttacctaatcaacttaatgaagatgatgtattttatgggaactatactggacacgataatcggctgaattgcccatttaatttctacaataagctaggctctattttttaccagttgttcattgggccgctgtattttaggtactactgtataataatgtaacataagggcaatctgaatggccgttcaggctttatatattcactttcaaagcatgttttttcctgttcgactcttattttccccgtgctcaacatgacataaacagcattgactctcaatatttgtatatttaattcatgaaggcagatatctgttgccaatttattaggtaggatggtcaattcaaatgaagaacataaccaagaagtagagagggttaaagaagttgactctcaagtggatagcatcgtccccgatagtggtggtcgtcctagtaggggtcgatccggtagttgacctggtagctgatccaagacggggagacgaagaggtagtgccatatccttcaacgtaaagagtagttgcgttcaaggtttcctcgtcacaaaatacgtctctatagtcctgtgctgtattagttccatcgccaatatcttcacaaatacaattggagattggtgtgaagaattcctcatcggagtacttgcacaaacatttggaaatgtctccaacagaattatcaaatccacatttttccatagctttagcagctttttgacaagcagccagaccacaggtaggactaagcttgagttgaaaattcttgatcttcaacttttcaaaatttaagtcggtgagtgcagctacggctacaatcgaaaggaggaaggaaaaaaggtaagctggtctcattttgtggtagtttggcttgaacagttgatttttgttcggtgtgggtcaatgtagtaagtgatcctattcgtgatccagtagagaaaatggctacaatttatagagcccgacatgttcatgttctcttcgtgggattacttcggatatgagcactactgacatatacacaaatatcaagttgcaagcgaacctgagggcacgaggtgtcgatgaccacaaaggagaatagagggggttgcatgaagataggaatctcagcgaagctggaagtttacgagaatttggaactcaaggaattcaatgcaccaagagcctaaattacgaatcttcttggaaattttgttaaaattgtaccaccacgattcaggatgactcttcggtacatgttaccatatttagatggtcaacaacgtgggatacttctgtaggcattggtcgttagcttgctgggtagacattctagaggtcatggctaggagatgagcttaaaattcgcagccgtcatgaatctcgtttaagccccaggcttaaaataatcgttgcaactaaacttgttttggggtgcattcttctaaggggtcatcttccatctttatgttgaatctcatcatatcgaaaggcttctgtattccattagagacaataataaaacctacaattgccaatatcgttatttcgaagttaacagtagctcaatggtgtgttcattgctcccccactttcacaatggccgagtttgcctactcctccaaaaaaaaatcatttacgagccgaaaccaataaggggggagacctcctacttttagtttgaaaccagttgtactctgaaaacaactggttttgttttagagataaccttgtgactcagtgctctcaaggaaagagtcatgtcagccgcaaagaaatgactttctgatcactgtcagaatgcgtacaaagcctacagaaaacggaaaaatggtacaatccccgaaagctacgaatctctacttgatgggaagctcacgtgtctcatctagtcaagagctggtttattagagtgaatttcggctctccaattggacaagccgaataatttctaggtggatcactgataatgttcttctggaatgactggaactgcattttacaagggagtgcaagaacactgacctagataaggaatcacaagcgaatatatgacgtcaaggaattatatccattgtcagattatagttatctaaatagcacagtatgaatagcatttttcacttgggaattcatggaatctgctcctgggcaaattaattgtggttataatttcttcgcatgaaacatttacattcgcttataatttctactttgtcgaatatattcgacaatttggaacaatattattctgaattagtgaaatggaagcaattttctataaagctcccatattctcatgataagtacataattcttgtggaagcccaaattctacggcagagttaattgtcaatgggtgcaaaagtactcctgcaccactaattcagaagctttccgtaagaatcagttgcataagcacgctcgcagagattctttttcccactcattgttctccctttttgggcagccatctcccaataacacggagttgtgggccgataacccacacgttcatctagtaattgagttctgggactatagagaacaaaggaggggaacgtcaaaccgaagcggaaccgaaaactttggttcttgacagtccgagatcgagcacggaacaagaaacgagcagtgtgttagcgacggttgcgaaaagaggagaagacgcgataaccaaagatgttgcagttctttggctatctacttagtcaatgtcggtgctccaacaggatgaatacggaaagaaccacccgagtttggagccggtggtttacagttgcaaaatgcctgaaggtttggctatttctttgaatctcccggaacggaaccggaaggttatgtactgcggtacgggtttttgctttgcccgcgctgtcccgcttcggcaagctcttccgggctagcataacgagggaaggaggagaacgtcagaataggaaccagaccagcaataagagacaaaacaagcctcctaatacgccagccaactgtcggactgaagaggtgcaagattgcaaaattttcccagcgacaacgtcattgctctaattggagtagtgacggacagacatacagacattttttcaaattcttctgcgagctccgaatttttcagaaccccaaaaaacgacgcatgtggcattgccgcacgtctgcagacaaccagacagaaactctggggtttctgtcttgatccaagctacagaagccagctgatccgtgaacgtgtaaaggaaatgggcagttcttccagcgagcgaagaccagaggacatcaggtgacaaaagattggaatcatctgattgtgcccagctacattgttcagacgaagtaatgagcggaatgtcggacgtcttctgagagggaccgtgccagcggaagagaaattcagagactgtttcggcaccgacatccgctggtgcacagtcccataccgatgtcacactagccagagcttattgaagcaggcggagggatcccttgacccgagcaccggggtgctgacgtcagctttgacataagacgggtctgctcgggaaacacctcttccagcatagatagcggttccggcttgctcctttccccagactttaggtctgtgtgcaggcccacctatatcaatgttccatgttcccggggaagtggaatattcacgtacgatgactgttgtagaacaagaaaaagcaaaaccagatgattttagtatcggggtataaatactggaggaattcctcacttggacagtcatggttccggttgtctctattccatcaccgatttttcaggtatcctcctctattcataacttttacctattatcacacgatgtctcctccatctgccgtagaatcatccattaacttcgaaggtcaccctaccatcaagtccaaccaagacccattagtcaagcaattgtctttgggctctgaaaccatcattcgtcacaatgctcctcctccaaccttgtacgaagacggtttgttggaaaagggaactaccatttcctccactggtgctcttatggcctactctggtaagaagaccggtagatcgccaaaggacaagagaattgtcgatgaagaaacctcttcgcaaaatatctggtggggtccagtcaacaagcaggttgacgaattaacctggaagatttccagatcaagagccctcgactacttgagaactagagaaaagttgttcgtcgttgacgcttacgccggttgggatccaagatacagaatcaaggtcagaattatctgtgccagagcttatcacgccttgttcatgaccaacatgttgatcagacccactgacgaagaattggccaactttggtgaaccagacttcacaatctacaacgctggccagttcccagctaacgtgcacaccaagggaatgacttcttcaacttctgttgaaatcaatttcaaggatatggaaatggtcatcttaggtaccgaatacgctggtgaaatgaagaagggtatcttcactgtcatgttctacttgatgcctatcagacataaggtcttgaccttgcactcttcttgtaaccagggtaccgaaaagggtgatgtcactctcttctttggtttgtccggtaccggtaagaccaccttgtctgccgacccacaaagaaagttgatcggtgacgatgaacactgctggtccgacaacggtgtattcaacatcgaaggtggttgttacgccaagtgtttggacttgtccgctgaaaaggaaccagaaatcttcaactccatcaagtttggtgccattttagaaaatgtcgtctacgaccagaacaccaagattgtagactacgaaaactcggccatcaccgaaaacaccagatgtgcctaccctatcgatttcattccatctgccaagatcccatgtttggctgacacccaccctaccaacattatcttgttgacatgtgacgcttccggtgtgttacctccagtttccaagttaaccaacgctcaagtcatgtaccactttatttctggttacacctccaagatggccggtaccgaggaaggtgtcactgaaccaactgccacattctctgcatgtttcggtcaaccattcttggttttgcacccaatgaagtacgcccaacagttgtctgacaagatctcacaacacaaggccaacgcttggttgttgaacaccggttgggttggtgcttctgttgccagaggtggtaagagatgttccttgaagtacaccagagccatcttgaacgctattcactccggtgagttggccaaggtggattacgaagtattcccaactttcaacttgaacgttccaacttcgtgtccaggtgttccatcagagctcttgaacccaactaaggcatggactgaaggtgtcgactctttcaacaaggaaatcaagtctttggctggcaagtttgctgacaacttcaagaagtactctgatcaatccaccgcagaagttaaggctgctggtccagatgtttaagttttgtatttattgggttggtaattatttatttatatagtcattaaagtttcattatatttataaacgttgactaatggagtatattgagtagataaaaccaatatggcaagttgcgccatctgatcgtattttcacgattctcgtaccgatcgcctgttaaattatactatcttgataggttccaagctctcagcgcggatctactctttaaatactcctgatattctgtgtaagaccggactcccagtccaagaatttcatccgactcttctacagactattccaacaggtagaagagcaagaatctggaacaagagagcctgaaagtcaagggaatagaatggcaaggatgggtgcaaaatacatctggcttcttcgaatctaaagatacgagcttactgatcttgctaccactttttagatgcagtattacgatagttgtccgactcttccagggatcacagtgaaacacattgaagtcctacttaagatccttccgatgcacccaccttgttcgagtaattccaggtatcgaagccaatctgaattactctgcagtttctccacagccagatgaaaaaatatctgcaattcacatctccgacagaatcgcgatatcaaattgcgcctgattgcgacaactcgacagaagatgcaaagatgacagagtagaagaccatcctaatgctgtctcagcggcatcaataaacggattaatagaaattgcaagttatcctttgctcgctcttttgtcctcactcctttgtcctcactctcagcttctcagaaggagaactcgatgcgcccagatcaccggtactcttcgaacacatatcctaagctattgtctagagacatttctattatggtagtagcactttccaacccctttccgacagtagattaaaacagatggaagggattttcagctggcaattttcatacctccgactagagccggatgcctgtgcccaaaaatatttttgggttgcagaagcgggggagacatctaggacatagaaaatagtctcgaaaactccgatttatgcatattgcacatgcaattttttcactttaagcgaaatacaggaatgcttctataagtccgttgaaccaatagtgttcacagcgatgtcattcacccaaagagaattcagggctaagaaccaccttttgagccgtaggcttgaaagctccgagaaaacaaaacagaccggacattgaattcgtgtgggatgcactctttcagcaagtttactcgataattcggcaaattattgtactacaagcctctattcagcaccgccaaagcaagtcacaccgaaagaatcggaggtggtcgctaccatagctccgaaatgtggaggcgtatccgctttgaaacttgtgaataaccgtgcacatggatattcttctaccccatttgcgcaggaaccggccattctgtagctgttcagggaggttttgagcaaggccctagcggagctaacagaatgttcctggccatagttttcctcctgtgaaaagtgcagaccttattcccaggacggaagttctgagagtcacagcatcacataccatttggaacgaacacaccattgagcatgtacgatttctccactcccatggtttgatctgcgaattttcatgctcaaaaattcatttgcttttgtgctttttcagtaataaggtatatagaggggcatatccgactttttcgcagctttgagatttggcatagtaaggaagtcgttcttaattgcttcagcttattttgtccaccctcttcattttagacctggaattctttgtacacctagagaatcttctatctattcaagcgttaaacaatggcaaattttattgaattcgtcaccaccaactggtacatcatcattccagcacttctagtgttgcacaaggtctttgacctcttgtatgttcagtatttgtacagaaagcttggagcaaagccttgcaccaaccagacagatgaccatgcttttggtattcgtgctggatttgaaatgttgaagaaaaagaacgaaggaactgttgtagactttggtgcagaaagatttgaatcccgcatcgaccccaagatcccaaccttttccatgagattgttcttgattccaattgtgcttaccagagaccccgaaaacataaaggcattattggccactcaattcaacgagttcgtattaggctctagattcgaacagcttgccccattgttgggtaaaggtattttcacgttggacggtgaaggctggaagcattccagagccatgttgagaccacagttcgctaaggagcaagttgcccatgtgcaatctttggaacctcacatacaagccttggccaagcatgttcgtaacgccaagggcaaactgtttgacatccaagaattgttccacagattgactgtcgactctgccactgaattcttgtttggtcaatctgttgaatcattgagagacgaatctgttggtatggccgatgaagctacggacttcgcagggaagagtaccttcgccgcttcgttcaccattgcccaaaactggttggctaacagagccgttgcccagaagttctatttccttatcaaccccaaagaaatgcgtgattctatcaaagatgttcacagatttgtcgattactacgttcaggtcgcattggacactcctcaagacgaattggacaaaaagtccaaggacggttacatcttcttgtacgaattggtgaaacagactagagatccatacgtgttaagatcgcagttgttgaacgtcttgttggctggccgtgacaccaccgccggtttgttgtcatttgctttcttcgaattagccagaagaccagatatatggagcaagttgaaggacgaaatctatgagaatttcggcctgggtgagaactccaaagttgacgagattactttcgaatcgttgaagagatgtgaatacttgaaggcattccttaacgaaaccttgagattgtacccatctgtccctgttaacttcagagttgctactaaggacaccaccttgccaagaggtggtggtaaggatggtagtgagcctattcttgtcagaaagggccagtctgtcttctacagtgtctatgccactcacagaagcgaagcatactacggcaaggacagacatgtgttcagacctgaaagatggttcgagccttctgctaggaagctcggctgggcttacttgccattcaatggtggtccaagaatctgtttgggtcaacagttcgccttgactgaggcttcgtacgttgtcgccagattgattcaacttttccctaacattgaaaactatgaaccggaggaagtttacccaccatttaagaactcccaattgaccatgaaccttttgaacgggttacacattggcttatactagtcaggaatacatacattatatagtttaattgtccgctggattggatatgaatgcgattttagagacttgataaagtggaccgaagtagtattttcacagtatagtgttccgaacgctgttctcttcacctttgaaagagtacgtggtatatatcttaacatatactagtgctggtgatgacttcagatagcacttgtgcctttgtagatggttaatattgtttctacctgacaattccgaatgtgattattatacaaattgaataaagtatccagtgctcctagtcccaagccaaccaacttcattagcattgaatccggttatctatttttacaccattagtggactctagtcactggcatactggctcgaatgtcgaaattgaagtctctgcttcgaataattgtgaattatctacgcttcttgactacgaatataaaaactacatctttaccatgaatacattaccaaataacccattctctatgaatatttcaggcttcatgagctttcaaaaacatacaatatctcaaccatgaatattctatgaaatgtcgatgtaatccttgctcaaagttatcacaagcagatgactcaataatgcagtagtgctctttctcatttcactttccagatctttacactttacacgcaataagcactgaaagctagctgggagtcttgaatcctaacctagacataccatgatctaaccctgtccactggtgagccaacttatgtcgccccttcactatctctcttaaacttataaatatgcctgtaacccccatctcttgaccatgtctctgggatgttctcatccatttctcttagctttttaccgactagccagactctctggccctcacaaagtcttcttctaatccgcactgtcttaacaaatcttcacgtagatttacactatttaaatctgctacatgcacacttttccaggtaaacaaatttttaggctcttcttcaaaacgctccagtttaacgttacagctcttcaattctcctagaaatctcttccacatcacacaattccaccatagccagccaatgacgtcgcttacgtggacacagttgccactagcgacatgctacaatgcgattcgctgcgacgacctgacttacatggacctggtcacctccatcagactggatctactcaatgtgcttatggctccaggcaaaagcgacggatccagggctcggttggtcgaccagctgaagccagtgaccttttctgatggcgatgagtatcgcatcaacaagctgttcgcggagattgcagtcttgcttgcgtcggagtttgacttggacgaagtcatcacggccgagttgcttttccacgccaacaacttgagcttccagaagggtaccaatctcgccgactccgccaggatcgcgttctaccagcgactgctgtacattttaaacatcttgatctttctcgtcgggctgggccaggtgctgtcagttgtaacgggggaagctgagtacgagctcttcttccgtaatatcctcgggtcattttcgaggatctatacgcttctcagcatccttaacgatctcatcgacaaacagcgagtcactagcgatataaatagccttgaatttatcaaggcgataggccacgccagagcacagttgtttgagcaccacgaactcttgggccagttgttgtacagcttgatagaagcagaacctcgtaaatacgccgaccaggcgcattttgcagaaatagctgatttgctcaataaaaaagtctcagacgaggacgtatttgtgctccactttttgcctgccatattcagtcttgtaacgcagactttgggctccgatgccgaagcggacaagcttcacagacacatcacgtctacactcgcgaccgactaccggaccgtggcagataacgatgtagtggacgtgtccaagtcgaaactcaaaggtgtggatatcgtagtgtatttcttcttcttatccaggttcgtcccctggtgcaagcagctggacgaacgtactaaaaaatacgactacaaggacgacatacttcgctacttggaatggctcatcaactacggggccatggagagacttttgtcgtacacagcagacacggcacatccgcataccacacaactttttgaatggagcaacctctacgactttcggtcacttctccagaagtcgtgtcctcgtcttagcccggtgaagtttgtgtatccgtcagctcaggaggtaatccacgcatcgcacaccaagccaggattggacaacgtctccatacttttcgatactactgtctacaaggtgacaccggccttcagcgagaacttgttggcgccgcttttccaccagttcttcacgtgcttcatcaacaattctgcgttgatattgacactgttgcgtgacacagaagaggactttgtgttgtcatacatcaatagaaagcagatcgagaacgactcggacatcgacgccgtagtaactagaagcaagacagaagccaacggagatgcgccatccaagaacgataaatcgaggtctgacgagcttgatctcgacgagatagcctcacggtcagacttagaacgtttctacttggccttcgcctacacatacaactcgcggccagagctctgttcggacttctggtcatcagacgaaataacgaacgacatcgtaggcttcctcgcgtgggggttgagcaacaatacgtctccgctcatcacggctaccttcagcttgttgctcggttcgttggcgtctagcggtgacgaagcttctgcccgtatctgggagatcttggtcaagaacaatacttccttgaagaagaatgactactccaagatttccatagactccatcgtcgactctttgaactattacattgacgctctcatagaaaacttcgagcaggacttatttgaccagatcaagcaacagcagaagagacaagagtttctcttttcgagcagctccagcaagcaggatggagacgaccaaagcaacaataagattgtcatagaattggccgaggatgctgttgtcttcatttcaggatttgttcagttgatctcgtccatcgtaagaaatctttcgtcgtcgaatgagcgttccaacgaaatcaaaaatattgccttctccagattctcgcccatcatcacggggtttttgagatttgacaatttgatcacgggctccaagttggtatcagttgatattcagcctattggagccaatgcacccaagttgatcgatttgccaagcgttttggtcaatgaagacaacagagtcgttttgtcgaacttgatgttgagcttcttggctgacttcgttcataacggtgacaatctagctacaaactacaaggtgtggcgaattgttgaccgctggatataccacggcttattagaccagacaaacagcaatggcccaactccgtctcaattagatagcacgtcacttagacagccgccgtccaaacccaagtattccagcaagcgcaacttgagaatcaatcaggctttccaaattagcttgagccacctttcccaggtctctaatttcaccagattgttggcatgtctattgaagccgcttagcaacgagaaccaagctttcacgccgtactcgctcttgtaccctgtagatttgggttatggctatagaagcaacaacttaataggcatttggccgtacatcgaatacctcttgttggaggtattggcaaagaccgacgacttggatctgaatgaagacagacataagttgcaaggcgtcatcatggagatcatctattcatctttgggagaagtcgattggaagtttttgaacgaccttgctcctaatgtcatcaaaaatatcaccaacattgatgacatctttgactctttggtgccaaacattcatatgacgtaccagttgtttgtaaagctgcatcattcgatggccgtgatgaacttcttgtttgacgagaaggcatggaaagcattattcagtatcatcaatatcggtgtagatgctgctagttcaagcgatgacttgtcaattttgattcaaaacactttgtctactattgacaaggttttggaattgcaggacacctttatcaatagattgcttccaatgttgaagaacaaggatattgttcctatatctaatactagcgctcccaatgggtttggtaccagcatgagcttagcacttagcactccgagatcagtgtccgacaacttttatttccccaaagctgtaggtacacacggaacgtctgatttctacgagatatttttattcaacttgaagactgtagcccattttggactttatgttggttcgtccaatccagttcttgcagagtcagctttgagcatcttggataggattcgcttgtctcactactttattgccaagaatctgttcctgtccaatgacccagttttgaacacgaacagattattgacaacttttgaaagtatcgatgaatcgctcaagatcaagtatgcgttcattgatcactttgagagttacgaaaccaacttggagttgaagtataagattctccatttcttgctagggaacttgaatcaagccactggaaaggagcctacagtggcacatttcctcttgggttatgatatcagaggtggaaagctatttttccacgattccgataatacaaatacactcttgaaatgtttgttgagctgcttgaacttgagtttagatttgatttcggaaattgactacaacaacggaaacaacaatatcatcgacattggtccggccaagctctcgtctttgattttggaaattttgatcaagcttagtagagattcgatttcctctattattactttgaatcatttaagagaatcagacagtttgtttgaaaagttaatcaactatcaaccccgtcttgatatgcacactatctggtgtggaaacacatttgatggtgatcttcaagaggaaaactataatgagtttgtgaatagcgccttgagtacccaggctttcttttcattcatcaaccaaagaaacttgattttgcagtacttgtcgcttgaatttcatcatatcgtttccatcaccaagaaggagttctatacgcaattgctcttgaacaacaaggaatttttgaatggtactccaaaattcttatctttcttggatgtcttgaactataatttcaacaactttgaaattcacaacggcgaaggattcaacagaaagtacaacttgcccttattgattgaacatgtacacgacgagcaaacccacacagttgatttgtcagtgttgaacaaggtgtacaagctagtatgccaatcgtcaacgttcacgactagagaacagaagatttcatttgcgcaagaaataatggtggaaggaaacaaaataagcgagtttgtcacgaagtatttagtttccaacgacttgagagaaattcaattgaagacattgcattcgtggtgtcaattggttgagatattgatcactgatgatacggttggatccaaaaacttcatccttgaggttctacaggtaattttgccaaagattaacgactacttagagtcagacatcttgttctctgaagagcttatctcgttgagtgtgttgttgtttgacttgtatgaccaagaaatattggccgagaagaacaacgaggattttgcattgggaatccagagattgatccccttgttcaagacatgcatagctggtatcttgaattctaattcaactccaaacttgagatctgatttgtatgtcttggccaataagtttttgatcaaggtgatcagcagcgaagagctcgttagagagttgtctgttattatcaaatctgtggacaagaagtttgtcgatctcatttccaacgacgcaatatattctgaagggtcttcccgaatcacttcgattttgttattggagtcgttattccacttggcgtcgttgtcaaagaacaatttcattctagacttgttggtgaagaacaactcgttgttgttgttgcttcgttcagttaccaggaccgatgagatgttgctgatttgctcaaagagtggatctggtgtaagtttagattcgttgttgtacgagttgactgcattccgttccacactctatcttcttatcagagttgcccaatcaaaagctggtgcattgcagttaatacagggcgaaatcttttccattctcaaacaatccaacttgttgaagatcgacccagacttgggattggacttgctgtttgacgaattccaagaccttaagaacgtcagggtcaacttactcttggacacaccgttgtcgttgaatgatttggccgatattaggaacatcagaaacgagaacagcatctcttactttgagttcttgattccgatattccaattgatagctaccgtccttttgtcaatgggccccagctataagcctagcatcattcaagccagagatttgatggctggcgtgaacagactagttgtaggcataatgaagagagacatcatattggagactaagaaggttgaacctctgttgtacaaagaggaccagttttcactacatgggttgaaggagttggtgaggttgtttaccttgttggactcgttgatctcgtacgaagaaaagaacagatatgtttagctgataaaagtacaggcaagtaaaatagacatattatagatgcagaaatgtgtatatatgttttgacctaaaatgtcaaataaaatttaattacattaaacagtacagaatggcgaatagaaaactctatagaataccaaaatccaagtagtggagagtaatcctaaatattagactccagtgtatggtagaagacttcatgctactttatctggtccacctgcagtgcggaaaagttcaagtatggcgaacaaaatttagcacagaagtaagaatactatttgttctttaatactggaagcttcattatctaacagtagcagtacaaaaaatggccgaagaaatcgctacttcgaacacagacccctccaacttcttgagcaacgtgatcggcagctctgtggttgtgaagttgcacaatggagttgaatattcaggcaacttgcaaagcatcgatggatacatgaacattgtgttggacgacggcaaggagcttgtcggtggacgtgagatcagaaactacggagatgttttcattagaggaaacaatggtatgtattaaaaagtgaaggaacaatatgaggactgaatcgtggttgttgaaatacagagaggacttggtataaatgagattaagatatagaagaaatccgaacacacacgaagatcaaaagattgagatccgacacgacaatataaagtcgtagatactgctggaaatggatatatagaaggatttaaccagacagttgtagcttgaaagagtcaactagaggaagaaaccttcagagtgaaagaaaatgattataggaaaactctggtgaagttcgaagacctccagaaaagaaagaaaggaacggagttcgggcagaaaagagattgaaaatatttcaagttcagtgtggaaatgaagacagtcccacttccaaattcttcaagttcatggattcattcaggttttccatagttgtcactgttctcatattttgagaaataccatttatgagaggtatcgattttcaatcgtaaatgccacatttttgacttctaacgtcaacatactaacctattctagtattatatataagcgaagcttagactagttgaacggtatatatcgaatattacatgtactatagtagaagaattgttacgttcgtagagaagtccatggatttcgaattttctctgagtttcaaatttcctcaggatttctaaataaacacagaaagaaaaacaatctaagaagattctcaggatattattcaccttctctttgggtgaatagtatctagatattgaatcgtaaagttttgaccatatagactattgaatacggtcacatgacattagcacctgactgatcacctgaccatttagccaaccaatcacaactactggctaacctttaccgagagagtactggggccgcgttaactatggaggtcgtgtgcgaccaaaagcccgaacgaaaattggtctctggattcattgaaaatctatcaacatatttgcctaacaaatacttcttgaagcttttatactttattgaccaaagcatcgttcaacatgtcgttcgtcatcagaagacaattgtccaccttaatcccaccaaagattgcttctgccaaggtatgtagagagaagaagcaacttcaaatgcgagaatgaaaaatgaacagacgagcaagagtagaacaagagagatcaactccacaaaagttggattgtcagccaacatgggcttctaatcaatggattccaggatatcatcatagcggaagattgaattttacgagagagaatcttttgatttatgagaattgagagaaagggaagagattatagagatgattcatgaatctcagtataacgagaaagaaactgatggctaacgtgcggaaagcctgatgaatccaactgaaagtcgacaaactacaaaggtcctatcgtttttaccttcatgatttcaaagatgtcaacttcaattgtatcaaatgaacattcaacatcacatccagccgtataatcgtaacatatgttgcaacaaaaacatgtcgtatatccattaccataacatattattataatatggtttcttgtcatattgaatatgaatatgtcatgataatctcaccagacgtctcttgtatacattttttcattttctccaggcctatcatcatcatatactaacattagcagaaccttggctcgaaccccaacgccaagagaatggctgaggttgtctccttctacaagaagttgccaactggaccagctccagctgcaaccaagccaaccaacccaattgccagatacagagctgccttctttgacggagacaatgcttccggtaagccattgatacacttggttcttgccgtagttattttgggttacacctgggaataccagtcccacttgaagcaccacaagcactaggtggattgcataggcactagttatttatattagagtaacgaatacaaaattgatttgagtagatgtagagcttgaaggaagggataggaggaaaaggaagagatagagaaagtcacagaatggagctggttacatatatcgtagggtgagcagatgaagccatgagatatgtagatatagagtctgctaacaagaattccgtgaaaactcgctgtcgagcttgataagaatagcacagaagaatgtagagggtggaaagaagttgtgtaggattaggcgagcttagcgagaagagtgattactgagaaacaataggggagaattacgtgaagaaggagagccaaaagtgttgggaattgcctaatataggcagaagttgcagtcccagtttgtagtcgtactgttcgtacgattttaccgggttgtatagagttggccagagatttaacccatcccccttacattctcgtgcgggcagaggtggagaagaagaaaatagcgagattctcgacagtgagcatttataaaaagaaaaggatcaccgtgaaacagaatagcggagcaacacggcgaagaggatggccactacggctatggcggcatcaccagttcgttaaccaaaatatagtgctagaaaagcttgacgaacttgctgattccctctcgctaatccacgatcgccagggcccagaaggaagaaattagcgatagcgcgggagtggtagtgcgacagagagtggcaggagatgagatgaaggctgtgggagatccattaggaccaaccgtcaattttaattcgacttacgacttctgtgaactgtcccattctacgagctgctagatcttccgtgatatttacagtaagtctatacaatgtagatgtagattatacactatgataagatgagctctggtagccgtatctcaagctctcgcaatttcagatctcacagcactggcgatacgcaccagcaaattccctactctgcgctatttcccgctactctcgctgcgctctctcacaatttctcactacttctccctatttccagcttctgtagccagcactgctgcactaacacacgactttgggctccacacacccccacttcccggtccactatcaacagatgatagtttcaccagactctcttttggaagacggaccccatcgtgacgccacatcgaagaactgtccattgcgccgtctggtcctgaggatactgtctacccatatcgatcctattgctattgcccaagaacagttgtatcgatccagtcaggctctctcagttcccagaacattctcgcttaccagaacttgaagacacagactacatacccagttcattctgtccataccatctcaacagcatccccgttacatcatctcacgaccacctccatcattaccatcgcatatccgtacagtttgcatcaatcaaccatcgcaatcgtcttcaatcggctcatcgtcaaacggcattaattttttcagtcgatactttcaattgtaaatctcaaaatctgaacatcacataatttccaaccgtgtgaactgcgccgttttctcaacaaaatttgcccaaattacttccaatcacaatctaatccgccacaatggacccgctggcctacgactaccatccagctcgttccacggccgttccatcggtgctgactggcgccactagtgactcctcttcccagcagcaacaagctcatcccgctcagcctgccacacctcgaatgcttcgttcggtttcaggaaacctccgaagatccaacaacaatgtagctgacaataccagtaacgtggaatcaccacactacatcgctgcttcggctacaaatgaccaccagtctcattccagaaaccccagcttccaacaaccagccaaaaggacttcatcgggctccagcgcagggagaatacaaccaccattgactccggctccaatcaatgccaccggagcactgctgcccacacataggcccgagcttttgcccccagcctctatcgcatctccctcaaccagagagtctccgaagggccagactcaacaacaaagcaatcagaaccaaaatcaacaagggcaacaaaatcaaggccattctcgtcacgaacaccacggaaaccaccatacagcacaacagtcgcattcatctcaacaccatcaacagcagcctcagtctcagtcacagtctcagtcacaactgcagtcacaacagcagttccacagaaaatcaattggcgactgggacttcgtgaagaccatcggtgccggatcgatgggaaaagtcaagttggcacaacacaacaccagcaaggaaatatgtgctgtgaaaattatcccaagagctgcgaagttgtaccaacgagcccatgccaatgatcctccgccacagacgacccaggaagctgctcaaagacacaaagagttcgataaggagattgcgcgcgacaagcggaccatccgtgaaggcgccttgggcaggctcttattccacccattcatttgtagattgtacgaaatggtacccatgacgaaccattactatatgttgtttgagtacgtggaaggcggccagatgttggactacatcgttgcacatgggtctttgaaagagaagcatgctcgtaaatttgcccgagggatagcttcagccttggactattgccacaagaataacgtagtgcaccgtgacttgaagatcgaaaacattatgattaacgagaagggcgatatcaaaattattgactttggcttatccaacttgtactcgcctaagacgttgctccaaacctactgcggctcgctatactttgcagctccggagttgttgagtgcaaaaccatacacaggcccagaggtcgacgtatggtcatttggtgtcgttttgtatgttctagtgtgtggaaaagtcccatttgacgaccagtcggtttcggtgttgcatgagaagatcaaacggggtaatgtggattaccccaacttcttgtcccgtgagtgcatctcgttgttgtcgaggatgttggttgtagatccttcgaagagagcaactctctacgaagtgtgccaacacccttggatgaacaagggttacgagtacaaggtatcgaactatcttcccaaacgagtgccgttgacgttgccgttggacccggaaatcatcaagacaatcgctgcctttgacttgggcctggcactgcacatccaggaggagttgacgaatgtgctcactagtgtagagtaccagatgagttttgaaaactggtacaaaatcacagacatgggccgtgagtacgcttctgcttccaacacacacatcttgccagatcctacaggtggtttccatccgttgatctcgatctacttcttggtcgatgaaatgagaaagagaaagagagccaaagaggaagctgtaaaaacacaattgctagtacaacagcagcaattacaagagaaacagcttcaggagaaacagttgcaagagaaacagttgcaagagaaacgtgaacagcagcgacaagccgatattgctgctgctgcagccattgtagctgcttcttctggagctccacaggaaatcgctacacctagaatgcctgcagaacaagatttttcacatctccctaccgctagcgtgaacactccaaaccagcagttccagtcctccccagcacctcagcagctgcgtgtagccgtttcggtttctccagctgaagtccaggacattttgttcccagaacgggcgcacaccactactactcctcgtagaagctctctgtcgccttcgaaggacgaactgtcgcagcttcctgaaccttctcgacatgttccagaacagcagcatctcagtcctcgtgaatctctcagtaaccgtgagacgttggacccaaatgccggcaagaatgccggaggaatcaactcgattttacgtaagttgtctacgaaaaagactaccaaatcgagccagtcgtctccagctcgagacagctctcctccacagatagacttctcttcgattccacctcctccagttgcaacagtagctcttgtagactcacaggagaagttatcccctctggaatcgtacacctccaaaagagacccaatggttcgccgtggtgtcagtatgaaggtgacagccaaggagaagcaaaccaactccagactcaatttgaaccctctggcgaacacgtcaaacgctcaacagtcgcagcattcaaactcaccaaagcttccctcttcgaaggtacccgaatcgggctccaagaagaaccacgctcgctcctcgtccacttcgaacaaccagaacaaattccacggctttatccccgtggagtacttgcctcctttgcctaatatcaatgccaacacaaataccattgtcccaagccaggctggctctggcgtccaaaaggctggtgctatctcgacttctggacgtaagttgcatcccaccgcaagagctaagtctgttgggggccataccagaaaggactcatacaactaccgccaaactggaaaccatccaccgttgccaaacaatatggcggctcagaacagcgatgagctcatccagacagctaactcgtccaacaatgacggcttctttgacgacgtaaagttggacgatttcgactaccaggacattccacgtttgacagaggctgaaatcatcgagcagttcaacaacgctccgccaaacagcatgccctctatcgaacactgtaagacattgttcttgaagggtttcttcagtgtccagacaacttccaccaaacctttgccagtaatcaggtacaacatcatcaacgtgttgtgtaagttgggggtgaaattccaagaggttaaaggaggttttgtctgtgttcacacgccgtcggttcaacagccagtgggtgataagaacgactactcagctaataccagcacgatagccgactctcagaacgacgaagaagacacccagcacgatgaagatgatttcaatagtgaagaacgtaaattgtatggtgacgcattcaagtcaacatcttcttctattgacggagaacaagacaccgccacaatgaggacgccagaaccagaacaagtcagaactcctagtagacagcctctgttacacattcagacccaaacgttgtcgcctagctcgaatagctctcgcgaccgtagatcgtctacgtccaccggcagtggtggccatagacggaagttctcaatcggcaactccatcttgggaacgtaccgcaagagaaatggctcacaagtcaacatgccccccaacacgccagcaacagctagagtgggcaagggcttgtatcccgacgatgaggattacgattatgatactgggtctaaagaacgtgactatgatgaaactggtgacgatgtttctgtcgactccttaaatggaatgatgattggcggaggcagcgacatgttggtttcgtcgagaatcgagcacagagccagacaccaacatagtgccagtatttcttcggcctctagaggcaagaagtcaccattgaagtttgagatccacatcgttaaggttccgttagtaggcttgtacggtgttcagttcaagaagctcttgggtaacacgtggaactataagacgttggctgggcagatcttgacggagttgaacttgtagactagatagttgacttataatatccaggcgacccatagatctgagatatgtgacttagctccaatctacgtcatcttataagacttaagctgatctgtaatatcatagtaacgatataggatctgtgttaaactactagactaacagttctgagagagaaggagaatcatatataaatacttatttattggaaaaggaaacggtttccttctgtagattaggtaagaattaaattctttgttcaaagcaccataatatatatattcgatgttatactaattctaagtctaagtagttgtctctaattgtagttaatccttgaaagtggaagactctaatgtgtacagtttttcaaccttggctactctagtggtatagttcgaatagaactcgttgcggccggctttctgagcaagaaggtgttccgagttcttcttccagttgactatactaatacggtctgtccagtagctcaacgtgattccctctcctttgtcgttagaaacgctttccatacccaaatagccaggcagtttttgggcaagttttgctatttctgtgcctaatgcccggtactttgtaggatccaagcctggcttgaagatctctgtgaaagtgactacgtagtaaggaggctccggcgtctcagctataaaagacatgttgatatatagaaagatacaaacttcaagaatgcaattgaggtgggaaaaaggaggagtcagaaaaacgacttgatttatacaacttgaagctccaaggtcttcaagaagcctagtgactaatagggctaggcttcaactccggcatttaagagattcttgttgtaccccacaaaaacagaatccctgtatgactaacccttcctttctattggtggacctagagcagtgatattacagtaatgggattaagcgtggagcaagggagtaagcattgtgcgtatcaaatagtgtcagcttgttaaataatttaaataatgagtttattgctgtgaatttggttaaagagaattgatttttcaaaaatataattactacaccttcactttgttagatccatgatgccatatcatttgttgaacactgtcagtatcagagacaattgaaaatacccttctgatagaggtgttaagggataaatttagaaaaggaggctgcaagccgaatattgtgatcacattttgcacccattgcacgaattctaggtcgagcataaattaaatcatttactgatacgcacaaaagcctcgaatgtctatttgtctattgatactggtcgtatatctgtgtgtcgctacttatctctctgccaattgtgtaatcgtctcaatgtcttgtttagattggtgttctatgtgcaacagcatatttaacagtatttgcatctgtttcttcttaagtttctaaggcatttgcttcgtttttatcttcaggtgtcacgcctgtaacttcccgtacttcttcctttactggccccgcttgcgccacagcaacttctgaagtcgcctcaatagaatcttccgtagttgcctttgtcgcttctgtggcagctaatgcagctgtttcattggcagtttccgaaaactcttgttctacttctgacttaacagtctcatattcaactgagtccgcagtttcgctagcttctgcagggtttggtgttggtgtgaaagtaggtgttttatcaagtcttctgagtttgattctatcttctctagtcaacccaaaaccgaaatcagtccgctgcccttcatttatgagtcgctgttgttgctctttaaaaattcttcttctttccaatctcttttccgccgccaacttcaattcgtattcttcttgttcacgttgcttttccaactcttcttgcctttgtttttcctttgcttccaatctagaagatcttttccttgttgccaaaagtgtagctaattgtacttccttacgcttgttgactaggaactttctctttttgatttcgctggcaaaaatagcatctacaacatcgttctgatgcaatctgttaaccaacgccttgagcttgacactcttcttcagacgcttgagaaactcgtcgaactcgtaaatgttcttgtacaataactcgaacttgatgtttttcgaaatatcaaattgtgttggcttaaagtggccctcaggatactctggagctgacttccgcttcttaggaattacaagttgcgggtacagcactacacgtttatagagcctgttgctgtcgaaaagaagatagtacgagtcggtattatgagggtcggctataagtgagttaactcgcaagttttcggccgaaagtccccacttatccacccagtcccgaaacttggagtacgacgagatatatgatatcaaaatatacaatacctcaaacttgtcggaaatggacaaagtatcaaactctatgtcatcctcggctgtaggttttgtgggtccgttttctgtattttcattttgttcatcgtcaagatcttctgttccaccaaggggtgtgtctgtgccaaaccaaagacggaagatcttttcgaagttgttcaacgacgagagtttggagttctgaagagttgagataagggccaacttcaagcgattgataaagagcatcgaagaacttgcagcgttggacgaagcttcgggatcgaagttgagtaagtggttaggggtcagagggaagtagttcaacaattccaactcaaataagtcaacatcaaagaggtccagctgcaatttgatatatcctcgaaaatgatagagccagttgacgacgtagaggtatttgtacgaagctctgagatcatttagtgtgtctgtgttgtactcgtcctgttgattggcaagaagagtagggtgaagtttggagagggcggaaatctggtcatcgtttccgaacgaaagcgaattggcgggatgtgacgaatcagccaccgttggagtagatgacttgcttttagaaaccatttaggaagtaattaaaaagagagaaacgagtgataaggaaagaacacaactgaatagctgaagtacagttgcaaaatcagaacagatggtcgaagttttcaaaacgcgacggtgtgcatataaactgaaaaatgaaaagtgaagaagagccatagttaagagcagaaagagatgagagagagaggtgagaggtgactgtgcaataatagaaatgtacaacaaagacagctagtagttcgagataaacagcagaaagaagtagtcaggtccaaaatttgaattgcaaaattctggctatttcgacaattatcgtagtctttaccacctgttaattatggaactcgtgttcctgcacattattttatgtataagagtcttcccagaataaccaactctgccaatcttcactaactaactagaataaataactgctttcataaaccaatagtcagaattggcgtttctcggtcaaaatgactgaagaccagcgtggatatttgccctacactacctcagttatttcgcagtcttcgttgggcaattccagcttttttggcaatccaaatccttccgactcatgtctagattcctagatcaagaagtagccgagattacagatcacagactaggttattgacatgaaacgcaatgtgcatcgcaaattgtgaacttttaacacatttcctatcgtcaagacgtagtctatttctcgtataaatggaaatcaagctttccattgttagttcacacatacaccggctatctgattatagcttaaagccttttgcaatattggctacatctacacacacaaatcatttgcacaatacccgatacacaaatttctgggtctggccatacgacccaacggatatgaaacgactgcattcaatgagagcccaatacagttttacaagttttgcaattacgtcactctcacatatagctctgtcgatcagagagatgtgaaattgggcgcattgttaataccgtcaattgacacaaatagtgtcctgctttggcggcaagtattacctcagagagccagatggaggtcgtcgcccctgagtgttctcgcttgttcggaatatgtttgtttcacgaacggcagatcactcttccgaatgctaaccaattccagttcgcatttaagcgaacttctgtaatttcacgaggtgatttaatgggtagcattgctttacttactgtagaaatattcggcaaaaattctgtacttcggatgcttaacctgactatgagtgtttctcctttctggaccgaacacgcctcttcgtgagagtcctctgtgcttgttaaagcaaatcatggctactggttgcagaaacaggagcgcaaaatttcatcagttccagttccacatggtgcctggctctagaccctgccgattagtaaagaaacttgtcgtaatggtgtcgtagtacattatccttatccgtagtagaaggagcagtactagaggtagaaacagtaaagtagctcgtagatttgagagtaaagaaacactacaattgtattgtttgtaaccgtgctgcaaccagcttcatcattcattaaaaatatagtaaaacacaactagaaagaactaaaaccagggaagtgaatatgtatgtcgatttcttcattttatatcccaaataaataccatgctgagcaaaccgtgaactctataactgaaaaaagtgtaagaaatctatttttgatcgataagacttctgattccctcgttcaacgactggatcaacataatctcgttgctgatcctgatcaaggcgttatgcttcgacaagttgggtaagccttccttgttgacacgagcacgcttactctttctctgttcttcactgatggctggtaacctattgaatgcctcgatatcgatgatctggcgcaagcaacgctggtaggccaacttacacaactgtcttctcttttgttcagagtgggagtgattcaaacgcttttgttccaacgacaacaatggcttttgggaggatcttcttctctttttatgttgcgtatcatcgtcttcgtcttcttcgtcttcttcagagtagccgtgctttctttcattagagtcgtaacctggaggcgttattatgttgctgttggcgttgtttttgttgttctttccgttgatgtcatcaaaagacgtagacgacgattgacgcgagtctgatggtgtaggcaactgactaggcgatgctgtgttgagtttcaaagaaggatggctgaatgcttcggtcaactcctttttcaaatgctcgtggtcttgcatgcgagtctggggttgagtttgactcttgtattcgggcttcatcgtgtacaagtcatacatgtagtcctggttgccgttggccttgaagttcttctgctggctttggggatgttgcaagttattatagtagaattgcaatggattggtgcttccattagggttggctaagttgtccaagaacttttccaacgcatcagactcagtgctagagaagaaggtgtcgagttcttcttcgtcttcatttctctgcaaagactgcttagcattggaaaatgagtagttcttgttagcatcgaagccttctgcattggctccgtgataggggagagctgtagagcctacagcagagttggtgttaccggcagtgattccaaggccagaactggacgcggaactagagccagaaccagaggccaccgaagggtggtaggcttgggaaaagttatattgcggaatgttgttttggatccgacgactgggactgtgaagactagtctgggcatggtcaccagcaagctggtgatggctctgagcatcaagcgaagttgagtactgttggttcaacatctgcaattggtcaaacgagttgagagcgttggcactgctgccgttattgttgtcctgcaacgacgagaacatcaagtaggcttgttcgaagtccatgtctgtagagagtaaatcaatgaagttggtttcagattgtagagtaagggtgtcgatagggtgatcgaaattctgattctgattttggctttgactttggttttcgttttgagcttcgcctaagttttctgtgctgaaggtgttatcagagttatgtgagtgttctatactaccgtcaggatgactatctatgttaccaccagatatactatgttcaggaggatactcagtgtatgacatcgtgaaaaaacctctctggaaacatatgaaaatttaagataattggcaagctatttatttgaaatcctttggaattccatccacaccgaaccccagaatttgcctcgtacggaaatacccaaatcctgtttggctaactagttggagatgaaaatctaggagttgttaaaattgcttatagctgaacatttttatttttgcctcgttttataaattattattttcggttttcatttctagtccataaagatattttcctgcgggtgcgcccagggttagaaaataccgctgatagaaatttggattgcaggagagttgcatccatggaacaaaggaggagagcgcaaagaaagttatagtggggatttcagaaatgccaatcaaattgttgccaatcccgactgattgttgagcgcatagtgtgctcactgctgcacaagaaatctctcaaatagtagctatcttttttgcggtaattttacccactccggtgctactttcggcagccccttaagtatgacgaggacaaaaggaagtttggctgtactagcgcggtttagttcaacactagctccggtatgtagctccgtccgtgacgtgcttgaccggagtagcctactaacacttgaggatattatcctgtttgtgcgtcaactacgccggcgttaatgcacgtgtcgtcagttaactctacaccgttgatgcacggtgcgggattgtcctgtcggctgcctctcctgccttcctctctactcctcttcttctttgtctttgaacacattctactgtgaagtcaccgtctcctaaacggtcaaacctgacactaaatcaagagctatatgagcaatcgtttacaatcttgctgtgcaatgatatacccatggatctgccgtttggtggccgcaaacgatacctgcatgcatgttcgatgtggactgcgatgccattaaagtctgactggaaagtttcggagggcccctcagcagtcggatctgctagctcgaatacccacaattgcattttcgtttcacgtagttgctggttgcggccgatctttccccaccttccactaagatgaattatgggccaagtttgatgtgccctcttgtcaaaagcttgaagttaaattgctacagataagcctggcacatatcctttgccctgtcaaagggtggaatgaaggcacctcattctcgctctcgtactcttagtaggcagaatagatattccggtaatttttacacttcgctgtacgctaattacacattgacaacttggcaacgcaattaaataatatgggattgcaattgcagatatcgcattatcgcatattcgcgctaatgaatctttactggttaacttcgtctaccgcagacttacccaaacctggtaccaacaagcctagaacacccactaacagcaacctagatctcccgagttctctaaaccagtccccacatacttggcccaagagggtcgcggaaacttctcgtaccatctcgtctccgcatttggttggaacaatgcaaccagctctgctatctcctatttgctcagatgtaggtcttcttctcctggaaagctgcatatctcaaccccactacagtacctcaaaactcctgttattacatactgtttgacggatgcacgacggattccatacagcaagtattgcctcttaagtccaagtttcacaatgccagtcgcccttttgggcctgatgcggggtctaacaatccatctctcgcccacttgctcgcttgcgagctgcggctgcgctattccctgtgtaacctgtaaagtgtcttgatgtccgatttacagttcttggcgcatctccagtccagagtcgttccatctcccgtcgcccgcgtcgccatcaaccttctatacctctcttgaagatgcctatttttaacctgacagagcctaagtctgattgcggagagaacaatcggccagttatcaagctcggactcggaagaagttggggtaaaagctccaaatctgccggaggtgcttcgggtaaaaggtttggttcgcaaactgaagacgtcataatgccaccttaaattacttgcctatcgtctcaagacccattgttctgagctccaaagtcgcctgagtgttacaatccgattatccaagcgaagaaccatttctgtgaatgccccctcttctcgaattgctccacttgaaacactcctcagcagggactgaactctcccctaccctgaactctctttatctccttttagtgctctagtttatatctatttacggactatatttctcgaaaattgcctatttttttggacaagtttgtgaccttgtaactctgtcgttttgtttcaatttattattgtaagctgtccatgtattacctagataattttcggggagaactggcgccggatttttgccatttcagtcaacattttattatagggctcgaatgtggaagtctggcatttcttagaaaggagttgcaacccaaatttcgtctttggactttcttttctcgaactaactgtaactaaaaatgtaactgtagatcgttccacccctttcttttctatagatttctcccacgaatgacaccttgaccaggcactatcacccaattgagaaatacttttggctaaactcaggttgctccctgaacttctttcttggtggtggctgaagctatttggtccaattgtcccttctgtatggaacagtcaaaatgcacaaggtgcctattacagaatattgacaggacacgtgaccaaacacgatatttgagtatggatttacattttgtactccgctagtctgttgagtttctgactcttgagcacttcgtaccatggacagcctattgctgcgcatagcagatgtgatcccggtgctggtcaatgtgcaattgtttcatatccagtcgaagcctgtgtccgtcagatcgccagtgcatttttcttctcgggatccccacaaaccacagacatttaagatcagacattttctccagttgctaagcaatgccgatttagtggtgctaggaattgaggtctttgtatatgtacaagttttcaaggagaaagtcgaacgtttcatcttcatctcgaagtgtgacacggttggctcgacacaattggactttagggtgggcgacgtaataaagcaatttttgacgtggttgattgatttcaacttgtacgactacaagattaaacagagcagcaaaggtgaaaatgaagaagacgaagagcgaaaacccaataccctctcttcaattgtagagaaattgaacgatcctaactattacaactctatttcgtactacaacaaggatccaactaagcacgccagaagcacacctcttcttcaattgccagaggttgaaacagtgaagttagttttattcactcgagctgcaaatcagtatttgtatccaaattcacacaaaaatgcacataaacattgcctaagcggagttcaattactcaaatggtggatcaagactattgacctgattgtttcaaacaagtgggaatgcaaagtagccataccaggtcatcctgttcatttcaatgcgaaattcatcgagtccacaaagaacccatggtatttgggccacattttcagtccagcagacgccaaagctgtatatacaattccacttttcccagacgacccaaagggtagattcttggaacatttgattgttgaaaatagatacagagatgtcaatgtagaacagttctacgaggagcttggctatagacaagagttccttctaggagaattggttggacttattggttgcgagttggacaacgtgaaattggttcagaaagaagctgctaccccagaaaattctgatacatttgtgtctattctgcaatacaagcaggttatcaatctcatcaaaggcgaggactacagtatagcatcagacgttcaatctcttgtaaggacgaagcttccagagttgatacgcaggcaaaacatgaaaggtgtagattaccataagatcgtcggtaagagttctactacagctgtaagagcaaaacgaccaccagaagctgctacaaccattaacactttaacagttaagaaacgcacgaaagtaaataatttaaatagccttgttcggaaaaagtaaccaatagaagtattatcaatcgttttatactacattttcggttcggaaaaattaatgcaagtgaagtatctataattcttagtgcgaatcgtcgcatagattgtctaagagttgcagatacttccatgtgaaaattgtcacttccaataaaagtaagagtcttatactggaagtaagtacgagaagaacagaaatcattccataaactttttcatctgcaaatttggcagagaaaattataaagaaagctaacaatagaagttgcatattgagcaagtagaatttggaaatattgtcacgtgaacttatctgaattacgttgcagccattgaggaatctactcactctacaactggctacgtctgtcgcaatagagatgaggggaaacagacttgacagagggacatggaagtggagagtcactgaggtcttccagaattttcaaactgtttgtttgtgcagaatgtggagaaaagaataagaatatctagacatctgtagctatttatgacagactagaaagtctgatttacgagttaattcaaactagagtccaccggggctctagtttgatcttagtcttacggctgtcaatacagaaccagataatgacaaaacgatagaatatttcatgggccgtatgttgggaaaaatgcgatgagcactaaatatttttttagaagtacgtcataaattttgtcaaaaattttgaaccgttttcttgtcttttacgtaactcttcggagttttgaggctgaacaaattgcttacaattgaatttgagtggaaataagagacaggtaggccaaggccaaatccaggccaggaggggcgaggcttcaattgtttgattttagaagggttataaaatgactcaaaaatgtcgcagaccgtggggcgtgacctcttgataagggactcctttttgggctatggttgcattttgtgcttgagatttattgtctcatgtaaataatgaaaaaaacgagcagacttaatgaactaaccaacattgggttgctgtagctgatttacgcagaacagtatgattattaataaaaatacagagttctttgcgctgttgggttgttccagattttccggtgcccagcaatgaaaagttgaaggtttgtgcggctgtttgtgtataggggcgacaatagaaggctatggaagtcctggaacacgagagcgatggttcgattacaagaatgtcgtattattaaagttagatcttactcattcggctgtatttcggagtttcgccagaacaaggaacccgaagcgcctgccgcaaatagtctgaatcacgaatccagaacgtgaactgggtgacatcagcttccaagacagaaccagtaaagaaactacaagatttgctcaaactgacgactttacacgacagtccgaatctatagttacgataggctcatatttggaagcatccaagtacgcgtcggtgggaggatgcaagggactgccattatgagtcgactgtctatccgcacagcctattcaccagaaacattgaaactcccaccaagatcagtggaaaggggtataggggtagcatcgttccacttgtcagtgctgctggcattactccagagatcgagatagagttcggagatttcattcggaagagagaactcaaattagcatccgtgaaaaataagtgcaatttgcgatgcagtttcggttgcaattgttggagttgacgataggagaatgttggtaagcgcgtaatggcgatcgctaattttgtagtgaattgagttcggaataattccacaaatggtgactaacgaactaagcgtggcccgtaatctcttggaatggctgacgtagcaaagagaagaagagatgagaatagagaaaatgattcaatagcgcatgccatacaaaatgagaaaaaagatccaacaaaaaaatacgccaacaacctacagaatacgtggcagcaagattcgcataatgctctttacatgagttttacagcatacatcaaccaccctacataaatcgtacattatacatcagtttcaaacctaatctaactgaaagaatagtctgattcttgtctgggagacatgacgacatgcgcgacacccagaccgcagcaatgggaggggagcattgtgcatgaaactagtggtggctgcggtatgcgcacgacgcgtatcagcggagagatagtctgcatgcagaccaaaccttaagagcaccccgatttaacttcaagccgcttttattttctggcacaatctggaatatataaatctccccagatcctgatttgcatctattgtgcctcttttccttttccatatccagcctttaagttaagaaacatatactaattaacgccaaacacgcaagaatgccgcaacacatcgtagtatcccagcccagtgacgactccggcttaacctctccaatcgttgcatctactcaagggtccctgaactaccaacaggttccaaaccagcacaataaccactacttaaatagcaacgccaatagcaacacgaatagcacgaataatctcattgtcaacctagggtcaccccgcggtgcttcgggaccgatatctccccgtaattcgttttcgactacctctgctgcttctaataaccacgtacgggaattgagacaacgtgcgtccattgccacctcgtctcctttcgctggaaactacaccacctctgcgttgtctagtcaagctcagagatcgccgactttaccagcccgtgccatgcattctacaccaggaaatagacactccttttcagactacagcttcccagcaagtccatcgggaacttcttcctacaacaacgaacagatcatagacttgatggaaagagaacaagacgccatagtcttaaaactcatgcgtgaaatcgatgccttaaagaatgaaaacaagatgctcaagatggggtcgtctgcaccaagctccgccatgaactcgtcttcttctatctctgcgccatctcagaatctgactaatagcaacttccgcagagcttcttctctttccagaagtgcaagaagctccataagctctgtcagttccatcagctcagtttctagcgctatcaatccacagccgccacaggtccagaccgtctctggcaccaagcgcaacaacagttgcacaataaactcattagacaaaaagagcaagctggatgttgcccgttacgaagaggtcgtagatgaaaaccgggcactcaagcgtgagatgtgtcgcttacagagagaaatcgagcaaatgcgccggtcataactacaaatatcagcatacacatactgaggagcgagattatctcttcagcaaacgcaagatctcgtcaggataaacattcacaggatgagatcctcgtcaggagtaggatagcaaggtacaagaaaccgccatgtcatctctgacagagcccagtggacaaatctcgttaagattactgtggagatgaaaaattcgtctaagaatttcgtctgaaaatttcgccagaaaattttctctctcaattacaaacaatagaattttcttatcttagagcgacccccttcctggcaacggaacataccagaaaacttggtcgccttttgagcaccgtaacagagtacccctcttgctggttttataaaccaccaaagatcctttccaccatgcggagagatagagaagagtcttccccacactcccagcagaaaatattttcctacagaaaacttttcatatttttcacctacggcactttcacttcctacacatttttgcacgtctttttgggttatcggcatcagcggcttcggcatgtctacaggttatagtataaataaaataagaacaatatatctgattacaaataccacactggttaggcttcaggattccccgttttgtatcggagtttgagctgtcaaattctggttagggcacgactcgcaaaaaaacacaaagagcgcaaatcgaaaattattttgatagagatctcggtgttgcactgcgctaccatgtcggaatcagtaacgccaattgtgaacttgtagagtagccattcttccaccgtactgtttcttttcgccagagtgcaattaacctcgaaatttagtctgaaatgtcgtggaaacgtctcgtattccagctaagtgtggcagttgttgccgtactttcagccgcccagttggcgtctagctacagcatttcaaagaagctcagttcgaagttctctgcttcaccattaaatcacgaaagtctagttaagtcaggtgaaatttccagtagcaacataggcgagaccggaggctcgagcggatatggagctttcaattcgccggtaacacttccgtttccgcaatggttgactgacttcacgggtctcaaagaatggccaggtctagacccaccatatataccattggattttgtcgacttctccaaagtacccaaccacattagacagcatgctcagggtcaatgcgaggatccagtgcttcgagatttgtccagttgttcgtttgattgtttcaattgcgtcgcttccgatgacgcatatacttgtcccaaattgtctcagacttttgacgacggcccaacacctgccactttaaaacttattgacaacctcagacaaccctctacttttttcaccttgggcgttcaaatcattcgctttccagaagtctatcgccagtctgtagctaagggacacattatgggctcgcacacatggtcacataagttcctaccttctctaactaacgaacaaatagtcgctcagttggaatggtcaatttgggctatgaacgctacctcgggccatcttcccaagtggttccgtccgccttacggaggtatcgacaatcgtgtcagacagatagtgcgccagtttggaatgcagagtgtgttatgggactttgataccttcgactggaaaatgctagattcgtcacaaagccgcaaggaacaagatatttacacggatctaaagaagttccagttcaccaacggtggcaagggacttatgctagagcatgacgctatcatgagaactgtcaatgtcggaattgagatcaaccaacgtctattgggggatcaattgactgttcctcaatgtgtggggggcattgattatatcaaaagatttgcatagacgagataaacatagataaatgaagtaatgctaataaatgtatagaatagagaatatgtacattaataaatgaaataattagtttattattgtatttttaatgaaatttaccaagattctctaaaagtttggaattcagtatggaaaatagtttttgtgcaactatacacgagttcacaagtccacccccttttctagaaacaacttctggtattctccaaatgcaatattcgtgttattggtgcaaacacctctcgtgattctgttgtgaaactaagaaaatttacactaagcatttcgcagccatttgctcgccattattgcctcgctgaaatgcacacaaaaacacacaagatgccgaacaaaaacaaccaccaaatgcaaacggcccatatctgtctttttcacatgctttccatgccaccatatcaccagtgaataaacactaaacaagttaaagatctaatgcagatactgctggaacagtatgcagaacgatgagatgccatcgcgtccttggagatgcaatgagtcgcagtcattagcatgtgagatactacaaaatgggtgcaaattcttatataggatgatatattatgacataatcactattaaaacaggaaacagtatatagaactagagaataaatagagaatagacgtctacaagtgtagcccaataaccgtagagggctgccttcttgtagactatcggagaaaatacctacaaggtctaggcggaggcagagacaactggagccgagccgttcaacaaggtagtcttttcgctgatggtttgcaaggctgggttgatagtggacttagcctcagaaatcaaagaatcggccttgcttctggtagaagaagtcacttcggcgacgtagccctgggtctggatcttcaaaggctggatatagtcgtcgttcaaggttttaatggttttagtagcggtgttgtacgaggcttccaagttcttagcgatcaaggagccttccttggtagtgctcaattcggcattgtaggtagaaatcaacgacgtcgagatctcggacgacttggaagaaaccttggtcttcaacgaggtgaaaatactgttgatgacagccgcgaacgtctccacggaacccgaactggccttagcagaataggccgtttcaggaaaatacttgttgtgagcagcaatcaagtagtcgtttgtaggcttgacgtacgtgctgtcaacgtaggatacggtcttaagggggaggccaataatgtagccgtcgaagtaggtagacaacaaactgtcggctttggcgtcaacggccgagaggtaaggagacacgggagcctgcgagaggaccttcgtgttgaccacgtcaatggctggaaccacgtaggccttgtaagcgtatgatacaatcgagatggtagccaagtacgagagaatctgagccacaggagtgtatgaggagatgtgagcagctagcttggagtggaacaactttggagcgtcggaggacattttgatattgatggatattctgttggggatacggagcttgtaacgagcttgacgtatagatctatttaaacgccacaggttgaacaaatgagtaggagtggaatctctggaatagtcagatttacaatgtgtaaatgtgagtatatttctgcgacgcgaatgcgatgagataaggcagggtgataagatcacgggaaagacaacagctatggaacgcttgtaaaagggcaattgtttttgctgaagaaactgctacgagaagaaaagagaagttgtttataaacagatcggaaagcaggaattgcctcagttataaatcaccaccacatatgttattttgcaggggtggtgctatcgtagttttgagttttcagtcgtgggccgccgaatgcatgtgaaaacgggatgatgcgagagaaacagtgcgtgcacgtaaacgtgagcacgccagatatcatgagagcaggctggacacagagaagggtaccgtgggatgatggcacaattgccagacagcggcggtgctgttggagcatatgaggattgtgtgatattttgggaagcaagcgttttccagtttttcttctgagttttcctcttttgacttgttgctgtgtgaaccttggtggattcgctaacagtgtcctctggcgggccgtattttctcgcgcggtcggtaattgtttcactaccagagcccagcgagacagaactttaccagaagcagacactaaccaacagcattaagattgggatcagctacacacggtcggcacgactagcacgccaatctcgagcaactcggctatactggccagtcgggcacgcgattcctgaatcgggcgccagtgccaataatagcaatcatgttcacgaaaccacccgatccttctgcgaggatttttttgcacccattagcgcactaccgaggaataaagcacatgccatagattgcagccgtattcaaccgagagccagttccaagagggaaagtccgcagatctggatctcgctataagggaagataatgaatctcggacaatacagaaaacaatcatctcgcgtaagccaatgaagacggttcacagacgtttgaaaaaacccatttccagcctcggtataaatttctctccacacatttctcgctacacatctggcgctgttttctcactgcacatttctcgctacaaattcactaccgcttctgcatttcaccacatttgtagccattctcgctattttccctattttcgctactcttcctagcctgataagttcactaatacattctacacattcgcctaaaactgcacgctttcttgaaattcctactcttccagcagagtaatattcagtctgcccggacagaccaaaacaccacatctctgttctcaaaagtttattcacgagtctacacgggtctagacaccgttgcgacagcccccggtctctatgtgtgttccaattaggttgacgaacaatatttcccagatgactcaagaacgagcttcaattctccgagaaactggcaaacaccgagaaaatatgcaattggccagatggaaagtttgctaatcccaaaacctcaggagggcagaccgtttctttctcactggaagattcctctctttctcttcagcccgacagccctaattgtaacaattccaaaccaacacccaaaagccccttgctgattcacacacttttacaccatcctacatccctaatgacatcatattctgcttcgtattgcgctaattcatctcaaccaccacccgtgctatccatgggcttcttgctcttactctcgtctcgtcacgtgaatatatcgaattatagccatctctctatcacctacaatttgctcatgcttcttacctacgcctcaaaatcacagcttctgttgattccgctgaaaactctttctatccgtaaacgctcctcgattcgtgccaaatatgcacgctttgattgtaccacccgttttttagattgttctagttggaagatcttattgtttctttatctgtatgtagtacttagtcaagagacgacgattaactggctatctttccttcctattctttcgtttattcttatcttgttttcttacttctgtagacactaatgtggttcttctttcgaacagaatctactcgaatcgaaaactgaaatttcaattgagactgcgaaattatttaaaaagctctcaaaatcaagctgatttaattgccactttgacctttatcaattctacattacaagagctgaatagaatatgattatatggcaaaattgtgaaggatactgatatcatatcgaaatcaacacatgtaagtttcgttaatctacactattcttcctctatctatcaattctactctgtgtgcttctcaattctagtagatcttcatattaataaagaacaaacctataaaagcaataaagaaacagaactttacgtcccgcggtctagaggtgggtggtttattactgttggttgcattctggagggttttcctttggtttgccctcgtcctcgctgtcgtcctcgtcatcttcgtcttcttcactgtccaactcttctccttcttgtccgtcaaagtcttctggaaagttgtactcaacagcatctccagtgaaccagtcaatggctctggggattaaacggtccttaatttcttcacccaactggtagtccaattccaaacgggcatccaagtcctcgtcttcctcgtcttcttcgtcttcatcgtccttctcttcttcatcatcttcttcatccctcttaggaggcttaggtggatcaaagaagttgaagaaggattctgtaggagtcaacttctcgatggttctggtctgcttggtgttcttgtttctctgctttcttctttcgatattgatagtaacattgttctccttcagcttccagttaatttcacagccatctgcatgatcgtagacaaagtctccagagtaaccgagttcggcctggtaatggtaagttttcgtcaagatctggttagagaagaattcattctcttcgaactcaaagatcaattcgaagcctggggtttccaagtactccattctgatgtctatcaagtgttccaacacttccgaatctctgtctgtgatggtctcagatacagttgataagttctccaacgatgtcaaccagaagccgggaataccagcagcagcttcttcgtcatcttcttcttcttcatcgtcttcttctgccttggaatccttcaattcctggatctttgcttcttcggtatcttcgtcgtcattttcctccaatgcttcaccttcttcaatctcctcagtagtgggctcttcagcgccattgatgatcttttttcttcttgcatacaaaggctcatacttcttaaagtatttcttctccaaactcaagagctccttctggaattcagcctctaacttcatctgctgttgttggatcgccttcaaaccccagactctctttttgacagactttggcaaagagtcaatatatccgctctgtgctccgacaagatcccccaatttgccttggatcatcagcaaaagtgccggattgttagcgagttgctgaccaacattttcctcgttggtttcttcaatcgtggaaacggtaggaggctgcgatctcaaataggaattagtaaccgaagcaggggtgttttgcggtgttggcgccttggaaatgtcaccgttcttgctcttaataggaccagacatcttggtggtagctggatgcaatataaaaagaacaatcgagtagccaataaagaagttgtgaggcacctgttctttctttctatggaaaacagcatatcttttattggtaaaattctggaagatgcgtcgtgtgtacaccggaacggacacgcgtttctttttcgctgttgggtgcgaaatttggacctgataaagagaattgaaagtaagggaagcaagattcctctctctggttagtaagtttggacagatgaagaaggaaaatttgactaattcagtatgaacttgtatttatgaatatatctaggatcctctgtgttgcaaaaaatcaaattattgtaaaattaaagcaaagagatatttgcgcagattgtcaaaaaccgcttttcatagatacactagatcaataaagaaatgtacttagcctatctatagcattgcaaaagaagagcgacaaggtaaactgaccacgaatagaaatatgaaacttgttaattatacatttttttggaaaatcacatagtaatttagaaatgcaattaattgtaatttgcatgttctagttgcaaaagattattcttttacttattgcatccgaaacatcttcaaattcggctacaaccttcattcatctactacaactacacattattcagtcatttcacgttaattagctacttacttctgagaagttaatggagctggcaactcaatactggactcaatagcaatgtcttcatacttgccatccaagtacttttcgatgtcgctctttctcttttcccatttatctacttgtgctaacttgtcttcaatttcattgatctcgttatcgattgacttcaagttttcttcagacgtcaagtcgtggaatttccagctgctgtcttcctcaatctccaagataaaatcatgatacttcatcaacaaggggcggtgactcaaggtgatgaaggtgatctttttcttctgcaacaattcgaagaggtaatcttccacatcggttgagacagcattagtgctttcgtccaagataaccaacttggggttcttgaacaaaactctggcaatactcattctctgcttttctccaccgctgaacacgtccttccagtctttgacgacgttgaagttgccctctctcttcaacaaatactccaacttgacctcacgcaaaatatggtacaagaagtcgtcattgtagcccatttccaagatatcgttataggtgtatgggtagatgatttggtcacgtaagtttccagtggtgaagtatgtcttctgtggcaaatagaaaatatcgtcatcgttgggtttggacaataatccacggtacaatggccataagccagcgatgattctagcaatagatgtctttccacaaccgttggatcccaaaatcaacaaattcttgttgtgcagcacctggaagttcaaattttccaccaatggctcattttccgagcctaaagaagagggaatgatcaccgaaatcttctcgaatctgatcccatcgttgtagttgttctggatggttccatggatgtctgaaaagccaagggcagagccaaagttgtatctgggagaatgcaccttgtgcaaattggtcaataaattgaacactctgtcggtatatccagtcaactggttgacatccttaatagagtacatcaatctagagccagcatctgccaaagacaacatcaatctcttgttgataatgaattgtctcatgttttgtctttcattcgcggcaacagctttcttatcagctttggtgtccggcttatcttgagccggccagatctcgtcaaggaatactggcaaccctgcaaaaatataaccccaagcagaccaagtgtatttcaagacataatcttctaaaatagagtacggaaacgagatgttgatttccttattgacatggctcattaaattttgaaaactctcctgaagcttggctttctcgattatggagcccttatagaaaccaatctcttcacagttggtcatcaagttcaactggtcgttgaaatacgctccttccaaatgagttctacgcgaagacaacttcccaaaagctggtgtagctcttctcaacaacgctgccgtaaggaagtagttggcgaaaataccaatgattgcacctgttcctaaattgtccctcaaatacaccgagaaaaagatcaagtctatgaaaggtttacccatactagagaacaaacccgagagtgtatcacagaatttggctacatcattagtaatgtattggtcgatgttctggatgtcgttggtgttcaacgagattttgtagtacgccatgactttgtccaagtacatgtcatggatgtatcttgtaaggttggttctgaagcctagtgaaagtctactatccaagtacttaatggcggcattggtgtatgaggctgggaacgcaattaagagccaatagatcaaatcacgcgagaattttctcccgttggctgcaatcaaatttttaacgatctgaccgtctaacttggctacaagtaacgacaaccatgttctcatcaagaggaaaaagcactgagaaagtaacaatgaggtgtttttacagtagaacttgggaatcaagatccgccatatgatagccaactggctgagaaacttggaactaaagatggttcctctctgctggctctggatctcctggttgatgatgaaattcttgtacaaatacttgtcagcagcgtactggtccaaattaggcttgggaatgatgattctggacactttattcttgcctttcgggataaagatctcacgcgagccattcttcaatattgttgacgactgtctgatcaaagcaggacgtgccaaccttttgtttagcacatattcgttatacttggtgaggatgtttctcactgtgaagtaggctccaaaaccagcagtagccaccaaagttgataagaagaggataacaggtcttgactggtagttgatcttgaccttgttgtccttgtaggtgatgacgaactcctggagtagcaacatcaagttcttgagatcctgtctctggtagtgggcgagtctggagatgttgatcattttcaaaaaatagtaatataacgatattgatgaactggcaaaaacggatgggaagatctaatgtgaaacaatgacaaaatgtagatatcagtatgaatgaacacttaatggtgaaatcctcagatgactcagacaatccaattgcgatcaagttctataacgtcaactctgttgactgatactccagtaaagaagcagaaccgtacagattgtttcagtcactaaacgaaaatcaggttcacttttcactcagtatctgatcaatataaatacttttgctgtactggaaaaaaacaaaactggagaaaacaaaacttggaaatttccttattctgttctagtggctttcggctatataagattgtgtaaacagatctttcactctgaggtttctggaagaagagacagttggagatgtttgtaccccacagaaaaccgttagtaagaaccgaggaagatcacatgcatttgaacgctagttactgcggcacggaggcaataccaagattaatgacagtagcaacgagatggtctgggactgaagaggatctgtatgcagtaacaccaattctaaataatatattggctggttgagaatatgattggttcagaaggtggtctggagcgtggggatcgggtgataccgagaaggcacgttggcaaggatgggaaactggcttattggatcttcgagtgggagagtgcgggaaaattgactcaaaataaaattgtttaatgaatcatattgtactatgatagactcagcgagatgaactggaccaatttcgggcctttgggacttttcaacttagagacatatgctgtgattctagaaaaatagtggagttctgtgaagtgtacaagtgaaatatgggctcaactgatgtgttttctcgtttaaaaataaacgtctgagctctgatatggtctccgtcttctctttcttttcaatatctgattgaaaaatgtattcaaatctacaattatcatatctacaattatttatttctgactatccgtcatacattatatacaattctatagtacattatctcccacgctcctgcccatttatctatatgagtagcaatctcaactaattctttgatattaagtagaattggagaaaatcaaatactcatcattctccaattgtaagacaaactcattccaaattattgattcacattttattcctttccgttggcaactttggtacagcagtacttgcttattccacgattaccacttcttccctttcaacagtccagagacacagttcttgaatttgagaaactcttgttcacaagcgttgggagccatcatggtgtagttgttcaaaacgcattgaccataagcagcaccttccgcagcacatttacccgatgattcaatgagctttttggccggtctcacacgtttaccggacattatagtgatgctgggagcaaagaacttgtttttggtgttaaagttctataaacttttagacttgttcttgaatgaattcaaaaattcagagaatcccgtgcttatcacagggacaaaatcccgtgatataattaaatgctgacatgttttgcctggtaacatacttaaaatacgacttcgtggccaagttggctaaggcgtaagactgttaatcttaagatcgtgagttcgaccctcaccgaggtcgtcttttttttgaatacaatcaattgctttaaacttagggaacgttgctgtaagtctactcgacagagagctatccgatattgaactttcctccctcccggtgagaacatgggacccttttgaccatcttctctagggagtttgattgaatttgtacctacacttttaatcttaatattttaggatcgtgtattagcagttatattcaaatatcttagattacttctttccactcttcttgataccactaccacccattggaccacccttcttggctctttctgccatttccttcttggcctgggcatcagccttttgcttgttcttgaaagccaaatcttcatcgtcgaaatcttgggtcttcttcttaggagcctttaaaggcttggccttaccaccttgacgtccagacatgttgtattgtagagagctgggatgaaaaaagaaaagaagaaagaaagaagagataactagatatgaattcgaaaatcagagtgaaaatgctgaaattgaaaagtgagaagcgatggaaacgtaacctgcaaattctggaaatagtgagagagtaatcaagtcgagacaaagagctacaatacaaatattggtgaagagataaaagtccaaaagctactggaacaaatcagactaaccaattgacattgtcatgtcttttcttcaggataaaaagggcagctgcttgattaatgagacaattcatttcttagctatagtcagcttctagattttcagtcacagaagaaatggacggattccagttccaaaaattttcacaatttccaagtgtaaatataacaaacatagatgggtttattctgttataagatcaacaacattggacccaaaagtctctgtcattgggcatatatatcttgtactcctttataggtttggtaacccgcactttttgcccaacctgcatttcccatagctccacaaatttcaacagatccgaaattcgagatcctcttgtctgtcaatattcaccgaaaaccaccaattgcagctcacagctcattccttgcccattttgttcatcatttaggacaaatcacacattatggcaatcttgactacagctgataaagaaaagatcaaacgtgccgtgcccaaggcaaacaacaaggtcatagatgctactgtagccagattgtacatagcctatccagatccaacgtcatggcagtatacgggattggtcggtgccatattgttagttgatgatttggtaggacacactttctttttaaaactcgttgacatagtaggaaaccgcggagttttgtgggatcaggagttatatgttaattttgagtacaatcaggatcggaagttcttccacacttttgagattgaagactgtttggtcggcctcttgtttgaagataccaacgatgcagttcatttccacaaacgtgtatctacacgggtcaaacacgcactgaaacagactgcaaacaacaaaaatgccatagccttgaagaaacggtctggtcccgttgaagtgaagcctggtcccagaggagaattcgtggacgccaacacggctcaaagatccagacggacaaagggagtactctactatgacgatgtaccacctcctgaatggcggtccttatacgcagagttagaatcggctggtatctctgaggatatgatcgccgataacagacaattcatcaaagattatatcgcccagcagggtggccctctcgtaggtctagaaccgccagttcctcggcgttaccagaagaagatcgagcccgttgtagaatcaactccaacggcaacaaaatcgtcttctcacaaattctctcgtatcgcttctggtgtttccagtctgaagaataataaggcaccgccacctccaccccctcctgctgcagcttcggcagctgaagaatacctgccagctccagagtcttcaccttctccaactccagagcctgccacagaagctgcaaaacctaactctcatcgtcttcctccaatccaaaccaacaatgcccctcttcgtgtggctcataccgaactgagtccagataccgaatctcaatccgagtctgcttctgctactcctgttagcgctaccccacagagtcgttttagagttcctccttcttctgctctaccccctcctacatttcatacttctcttcctcccccaagttctttccaaaatcagcagaatcagcagaatcagcaatcttttgctaaccagcaacagtcgttcaataatagaccacttcctcaagcaccgggccaaacttcgtatggccaaaatggcaattctgttcacggagttcctcctccagctccaggaagattggtgcctccaccaccaccaaacagaggagcagtacctcctccaccacctaacagaggtggaatgcctccacctccaccaaacaggggtgccgttcctccacctccaccttcgagagttcctggtcctacacctccgcaaagaacaggtgcgcctcccccaccccctcctccaagggccgctagaggtgcagctccacctcctcctccttctagaacagcccgtccagctcaaccccaacaacttccacctccacagtatcatcctcaacctggtcctcctcctccagtgagacaaccgatgcctccacctcagcaagcgctgcaagtccctccaccaccaccctttccagggcaaccacaagctcaaatccccccaccaccgccatttccaggacaagcacaagcacagatccctccaccaccaccatttcctccacaaacgtcctcagctccaccccctccacctccaccttttcccactcagcagttctctcaacctccacctcctccacctcttcctaacatgggtggtggcggagctcctccccctcctccccctcctttgccggatatggggacttcttctcctccagaagctacaggtgacgtcggtagagatgctctcttggcatctatcagaggtgcaggtataggggctctcaaaaagaccgacaagtcgcagttggagaaaccaagtgttcttttacaagaagctaagggccaacctcccgcttctgcagtttcggctccggaagctgcccctggtcaacaaggtagtttggccgatgcgttgtcagctgctctcagtaagagaaaaggaaaagtcgctcagagcgacgatgaagacgacgatgactggtagagctaagatatagctagtgattcagtactaaagttctttcaatgtaaacatatgtaaatttatatactcagctgtagaataaggaggacagttagttatataactgaggattattacttgtagacatgttctagttctttaattaagtctttagtcttctttaatttcaagaattttctttttcatctactaattatataattaagaaatagagaaatagatataacgatagtaatattggtatgtgttgtaaccatatatcgtgatctacaacaatcagttcatctggtccttttgaaatgggtgcaaaatatagaatgattcaagcacgtgactacagtgccaaaatctaaaatttgaataatagttgagatggttcaatctttcactattttaaccgtaattcacaagaaaatgtccaaaacgaaagctgatttgaaggatttgctagcatcatacaaagaggctgttttgtattggtcctctgcttttgaaaatgccgaagaattctcggggatccaggcagccaaagtgaataagccattagatgagcttcttaagcttgctaagttgataaaagcccataccacaaaagtaggaataattttcaagccagaaaacttgaaaaaagatgcaaaccctgccttcacgacattactgaagttgctggagactttaatcttgttagtatcggtagttgtccaattgaggcctagtgaaatatcacagttatactatgacgagctcttaaaaggcataaaacagcttatggattcaaacaaagagctttcccacgagttgacattgatttttgacagccagaatgatgaaaatacagaaaatacaccatctaaagactctgacgagatggacaagaggttggtgtctgttgggaaaatttggtccaactgtgatgtgttgatcagtatgataaataacggggctttagccttattgaccgataagataaagcaaagtgtgttgttaattgaagatggctttgaggagtttgctgagtggactgaaaatgtagaagagatcgatgacgacccatttgggttcagtgatgatgaatttagcgacgaggaatctgaagatgatgcacatcctccagtagccgaagacaaagacaataaactggaagatgatggcgaaaacggtgaggatgtggaagagttgaagaagttcgcgcaattgtggttgaagaaaattgaattggtgaaacttctcattctgtcgttcaagaaatcgttgcccttgtctacttcaggttcatctatagactcgatttatgccattcaatttggccttgtgaagttgatagataaattcattgtagacttgatgttggacagaactatcgatggtgaaattgaagagtatactggggcaatcaccaaggagtctgtgaagttagctaagcttgccagagatatccatgccaaaaataacaagaaggctaaatggtatgaagcatgggagacaaagtttcgtaccggtttatagacagtattataatttcacgtagtataatacaagcatagaattagattactataatcaattattgaactatccaatagctatatttactgtaagccagcaatgccttaattatatagtgagatagttcaatgccaacatactaatacaaattttacaaactaattcaacatgaagtctacaagacaaattgacgtgtcttttacttaagttatctagcatctctaagacttatatatggcaagggtcgtcctttcatatcttgctggaccgattcacggctagtcattcaaccaaacccaaatacttagcatggtgcttggcatggtcttccacaaaggtagcgatgaagaaatacgaatgatcatagccttctacgatattcaagtctacacctcctttgtagccagcatctttggcagcagcctcaaatatctctggttgcaactgtttatctttgtagaagccgtcgctttttccttggtggatcaagatggtaggttggttttcgtggctgtactccttaatcaagtgagtaggatcgtatttgtaccaggcttccttgtctgggcccaagtagtttccaaagtttttttctccccaaggacaagtcagtgggttagaaataggggaaaaggcactgactgattggtactttccgggattcttcaaaaatcccgataacgcaccaaatcctcccatagaatggccagtaatggagattctagaaaagtctaaatcagggaattgtgacgccaattcagattgcaattcctcgtggacatacgagtacattttgtagttgtttttccaaggatcagtagtggcgtcaacatagaaaccggcacccgtaccgaaatcccacgaatcatcttctccggcgatgttggctccacgaggtgaagtgtctgggaatactatggcaaaaccgtatttagctgcaaaatactgaaaaaaggacttttcgcttgcattgttgggcgtacatgtgagtccagacaaatagagcaacacaggaagctttgtcgattcatctttcttcgagggtacgaagacattcacatccatcttagtcttggtagtaacagaattgtgcgacaatttgtataattttccgccaaattgggcgatttcagcggtggtggtaaagctcattcttgtggaatctatcggcaaattggagtttctgaactagaatcgaacagtgaacaaaagaaagttgtgaataaaccgagatatttagtatcaggaatggtggaatttaacgtctatgtgcgctaccatatgataattggggacttcttttcccgatttggaatggccatccggctgcatgtgtactcgaatttgcaaccggtaaggatttagaaagaattattgttctagtacttcctcaaaagagtggtagtaaatcaatatggaatgtaagactatatataaacgaaagcaattgaaagtctgaaaatgaaaaaaaattgtgttgagacgatttgatacgaagttataaggaaatatattaataagactattaaaggaaagtacagcaagatactcattctagaaactagagtggcccctgggttcgtaagggaaaaagactgtcaataccccagcaaagatgaacaacgctccactaacaaatataggagcagaggtggtcaagtctgcgtagatggcaatgataggagcgaacaccccaagcactctgttgaaagaagctgccaatccaacaccagtccctctaatcttagtaaaaaagatttcgggcgtataggcatacaagactccgtacatgatattggaaacaaatgaaaaagcacagttccagcccaaattggcattgcttgtcttggccgttgtagagccaaacaagaataccccggtcaagatcaacgagactaacaaggtaccttttcttccgattctgagttcaaccaagactccagcaacaagggccccaggtacacccaacacagcgacgatcaacgagtttctgtaagtgtcgtgtacgctcaatggtttgtttgcatcacctctggtttcaagatagtacggtaaaaaggcattatacaaagggaaggcaagaccaattataccccaggtgaaaatgactaatgaagatgagatggctaactttcttgtagcaaaacattcacggatatgggagaacttatatttggaaagtttttcttcaatcaaaaggttcttcttcttcccgtccggggcaatatcttctccatcaaggtgtaaatcgtctatagcctgtaaatctgccaacgtgattggacattcttttctgttgattttagcgattctttctatagtctcaatggctctaacgtcatcgcccctagctaggtagaatctgggagattcgaacactctaaaagcgaatcttgcgatgaacatcaacaatgttatgcctcccatggtgaataagaagtatctccagccccagttgtcctttttgtgacagacatcagaagtatcgtcacaggagaaattcgaaataagagcccaggatatcaaattggccaatatttgtccgagagcccaccacagcgacatcaccgtcaaaagccattggtgggatttgggcaatgcttccaagaagatggcagaatcgacaggcaaattaccaccaacaccaaaggaccaaaacgcatcaaacactccaatggctgcgaatgtaggagagcttcctgctactacagcaaagattccggtgatcaagaacgtcaagttgaatgcccatcttctgccaattatatcactggaaagtgaccatacaagggcgccggcaagcaaacctaagttctgggccaatgtgaggtagggagctttaccgattggagcatgcactccatctacttcgttcaatctaccaagaattaaccccgtagcaatgggccaggcattatctgatagccaaccgaatccagccacaaagaaaagtccatattggtaccttccgaatccaatttcgtttatggcatcagcaagtatctttgatttggccaaatagctcttgttactctcatcgacatcgtagagctctccttctaagaagctagaaacatctgactcctttgttatctgaactgctaagggcttctcgtccttagtcgcttcttcggtcgcgtcataggcttccgcctttttattgtctgtgtctgacatctcaaattagtatttgtaagcggagagataattatactggatattctgagaacctgtgaatataggcataggcaaccttaaccaatatccaagagtccatacagtttgtaactactgttagcaaaatggggccctaacgaaaaaagtggaaaaaacgatcctttagtagtcctaatctaggaacaattacgaaatggcatctccatctggtttgaacaaaagtccggcattaagtcttaatttattaaaggatccactcctcggtgtagaatatgctttttagcacaattgccgtgcaaaccatattcacattatctgtatgcgcaactataatgacgtacttctacagcataatattcttctggtgcagtatgcagcttgacaagttctgcaagtggagaaaattaatctgactgtggctggtctggacacaactccaagcggagtgactattgtggatcctgaaagttatagcgcaatcgcagcaagaatgcaagaataccatatgaagacgctggaaagtggtacaaaacctaaaatcagaatcacaaaacatagactctacattcagttacattcttcggtagtcgttcatgggcgggtgtctacttgaacatttttccattgctcttccagaatgcctaaaagcactttcccaaactcacaatgaaggctttggttgcaattatttcgaaatagcacgttcaaatggtgaactctagagatattgcctgtttggggccgaactcgcgagattttggcctttttttgagcttttacgagcccacagttacaacctcagttttagcatctggtttgtcaccaaaagcggaataattccacaattcactatatgccactcagttaacggcgtattccggttctactcaagtaccactttatctacttccaaacttcttccaatcgtttgcactctaattggctacccacctctcttacgtgaactttacgtttattttttagccttatcttcggcgagaaaaatccttgcagcaaaattgttcctatctaaactatgccactctattgaagttgtatgacgctatgtctttttctatgatcaactcgtactcctctacctgccagtgttcgaaccacagtcggacagccttcattcccagcctatgggcttcaccacctcccccattttttgcatgctgtttgctcacccaccaacaggttgcaagattctggccgtgaacatcgtctggagttccaaaccaatatttcaagagccctccagatacgttggcttctatatgggaatcattgtctacttttgctagaaactgtctcttctctgcggaagcttggacttccgcgtacaaaattgatctgaatgcaatgacgtaaagtgtagttttgggaaaatccacttgtagttgtttggagtaatccttcgcaagctcgatcacttcagagatgttgaacgcttcctggtagggatcgaaagcatacttctccgtaaccggttggaaagactgtaatgccaaagcgagcactttgtaaggctcttcaagggttttcaaatccaaccagtggctcttatcgtagtaaggagacgatctgatctcaacaacatctctaacatccaaatgccttttcttatggtcgtggactggaactagcaaatcctggtcgtcttcaatagtggcagttgcttgtctggtgtgtggagccatattgctattgaacaaaatgtgattgagagggcaaggaaaagaacatattttgtaagaaggccatcagctgttgaagctggaaaccacagcaaactcccaccctaccggaccatttctagctttcccattccaaacagcgaaggctgcaactctacagccacaatggctcaagtttgcagtactttcttgttccacaaagccgcggaacaatcgagcaatcctgagtatcttccactcgtaagaaggtgccacatcgggaagttagttcctgtagcagaaacaattagtgcactatagtatataataatagaatactaaataaatatagcaaatattagctactgggaattgctcctgcaatcatgaattagcaatcgttgaccttttattgggcgatattagactgaaacagcaaacacaatagtggccaacatggcataaccaattgacttcatcatggctaccttatcggcacctctcaaaatcgtagacaaaccagcattaataactctgccatcatcttcttcagcaccagatgtagtaccattagtggtgaaattgaagccaggctctttggtatcaatatctccattccagcagtatctctcaaaacattgcttacattgctcagactgttctatacccaaacgttcttgacttcttctgataatagcacacccaacacatgctggccactcagtgtcaatggtgttgttgtatcttgaagctacttcgaacccgtttttgatcatgccaattttttcgtgctcttcataactcatctggaaagtcgaagtatttgaccagtacgagaaaggtctgttagctgtatatactaccaaaggagtgtcaaaaatgtcacctttggccagagttgcactcaggttcaagagagatgtcaagttacgaacatcacagccaaagaaagttggtcttgctgtcaagttcaagttaatcatcgacttgttgtctggaacatatgggaaaagcgtaccgttaccttgaggcaaaaattgtctctggtaagtagcaatgatagaggcaccatctggccaaaattccaaagtatcagctgagttgtcgtaggcgaaaataacatctacattacgatcaggttggagcaaaggtgccaatgggacattttgcaaatcttcaccaccatcacaaagatagagagtagagttatctgagatggaactcacagttccatcatccgtaccctcgaaagggttaggtttgtagatggcaatatcatcttcgtctttagaaactttactcaaaatcgatgaaataatagacttgattgccgatgacaaatcggtagtgttaatctgaagaataaactggttgaacaacgatgatgaggttcccataatgaaaccagcgttgtcgaatcctccaatacacgtatcgttgactggtttaccgtctttgactttcgttcccaagtacttgacgtcagtgaattggtacaaagaaggatcccaagtccccaattcaaatggattaacttcaaaaatagtcgagtttccactgatgatgaaactaccaggagttctaccgtctgccactacaataggaaaaggcatctcatggttcttgaagacatcagcatcgcgcaaagtcgaccaggtcaaagaagctccagtatcgttcaatttagcaaagaattggtgtgaaagccctctaccccatgtatcggtaagcgacacatcaaagcctgcgtctcttttatcgtccaagtcatcgtttatatcagtatagtactcaattgtttgccagactttaagaccgcctacattgagaatcgaatgggtcaagtcccaaatcacaccctcgcgcaaaatagtgtctacatctgtgaagttattcatggctatggtccccaccatccagttaccaccagaaagacctacgagataggtgctggcctgcaaaaggccccctagaccattctcgtaggctccgttagttctgttgtccaaagcagccaactgacccgctccacagagcatggcacggtagccacccccggaaaaggcaagaccgattgtgatggactcatttacagtgttacggatgaagtcctcggcatcaaagtcagtcatgttggcatgctgcaagaacgaaatcaagttagcatctgtgacttcgttacggcccttgatccaatcgctttcctggggtgaaagtccatcggctgctcttacgagcaggacatccgagggacagtcgatttttccgggcgcatacgaatcggtgggcgaccaagcccaagcaagcagggctatctgaagggttgtgaggatatagctgggtctcatacttagtatagacaagtagcaagtagataacgaaaaggaatcagaaaacggaattgaaagtaggattagttgtattcaaaatgaaaatgatggacaaattttcaaaattcacagggttcaattttacaagctcaacttcgtattgaactacttttgcgttgaccaaacgttacaattcagaactatgacaatggaaggcagtgctggtaatcaaactatggatagtagccgtagataccaagatttcaggaatcagctaatggcttagtcggatatcacgaggctcggtagaggagtgttctttgctccgacgactcttgcgatccacaaactgagcttatgggatggatgaacagggaagggagaaactgagtataacttttgcaaagtcaattctggatgtccagaaagaaaagttacgtataggtaaacaatttcatgtattcgataaagccctggataatttagaaccggttcttggagaagttcttttgattccgtcttgcatcggccggaagttgtggctaagaatagaagactgccggaaagcagccgaaacaaacgcaaggaaaaacttctgacagtcatcggactgcaggaagaagcgaaactttcgaacagacccatgctacgccgcccgtctttgcagtttgcagctttccgaggtctgcggccacatgaagtttaggttttctgcaaataaactacatccgatatccggtccaactcaggtttctaccacaccgtcggaccagaattacggacgggccaaaataagtgacctgggccaagattagattttttgttggtgtgaaacgcggagattgcagaagcgaacttttacgtggttggattacgtaagcttctcgttaaagcttgctcagcaaatacgtctattttcctcggcccaaagaaggagagcaaaagccggccactttttcctcgttaatacagtaggcatttaagccgggacctgaatctcccgtggctttggcacctgagcaactgtttgtatgtgagtgaatgtttcctatctatgatcacgtgcctcgtgactcggatgcttcggggaccctactttgtgcacagatccggaggcgcagcggtcggaaatgagtgaagcaacgtttctgagccgtttttggacagaaaacaagacggtgctacgactgttttgagatgtatgtccgaggagtcggttaaattcagcaggcttctgttccggtcttgacgagtaagatttatggcgttgccagttggaataggaaatctgaagcgagccacaaaatagagaaacacagaagttcgattcagcaagaagttcgattcagcaagaagttcgattcagcaccactggcagcgccggtggcagcagcaatcacgagccgcaaagctttatactgaaagtgtctagctccgtcaatactaaatatagattgggccccgtaattgtctactcattcttggtagagaggactctgaaagcaacgtgactatttacttactttttattctcaaaggaaaagatttttacattttgcaaccgttcgcacaaatgtgagccgaacatatttcaccagctctaaaatgacttcaacagcaagaatgaaaatacctcgtgattaagagaaggttaccaatctgcctctgtctgctagtaatctcatctctatctccatctccatctcattggctggatcatttctgtttttgtgtcgcagcttattcgtgctcaaatcttgaaatataaatctacgcaatctaaatggctgcgaaatcctccaacgtcaccatcgcaaaaatttcaacaattccttccccaaactcgactgttctgccatttcgtaaaagacaatgactaatttctccaacttttgccttccaatctcgtccccgtctcttctcctcttcttctcctcgtctctcagccatgactaccatcccctcctccgactcacgtcacatgatgcgatgcttctccacaaattcacaaaaccaattctggagatcttatcaacttcgtaatgtttcgtatttatatttttcttttcttttcttttcttcttttgaatttacttttcctgctacatttgctttgctcttgctttgagatcctttttcatctgtccttttgggtttcattcttatctcgcacctgctgaaaaatggtgtcagaagagaacgcgttggccaatatccgcaagtatgccgttcgccatttccagggccatcccgagtctgtctggcacaagctcccgatctcacgaaggctgtcagtgttcgtcttgctttttttgggccacttgggtgaactcagggtgattctcaccaagcgctccagaaagctccgcagtttccccggtcacatttcacttcctggcggaaaggcagacgatggtttagagcttgaatggcacgtagcacgtagagaaatggaagaagaaataggactctctgccaacaacgacttgttgctcaaaaactacggtttcaccattgaccatctcaacattttgcccagctatttgctgcggacgttttctgccgtgcggccgtgcatcggtttcatgaattttagatccaatgtagattccgagctattctcacaattgaagctcaacctaaatcccggtgaatcttcaagtatcttttcctgtcccctcaaggactttttgtatcctattctggaagaagagtcgctcgagctgcttgaaagatcgctgtatagaatcaaatggggcggaattccctggaatttgcggtcctacaccttccttcaaagcaacgaaaacgaagctccctggcttaaagacatcgtcgacttgtcagcaacagaagaggaggatgaaatatcggacatagatgaggaagaaaagcgtagcgtaactcccccaccaactgaagctcacaagtttaaacacaagaggcagaaaaacttgtctgcatggggtcgtttgggctcacgtaggcatgtagagaccaatgagaagatatatgatgtatggggactcacagccaacattcttcacgatttggcagatgtggcgtacagaggacctccggagagggagataggcgaggaggagttgatatacgccatttggaagtacggaaaccagatgaaaaccaagaagaggtctgaagctgaagtcaagcttattgagtctaagactgctggtgattatggattcggagagatattgcccagggttgagttcaataagttgaaacagatatacaagttgtgataagaagagactcagcagagagatgaggaagaagagaaattattaagttgaaatctgagattggagaagtcagaaccgagaagtttactgaggtctcacttttagtgagattgaagcatggactagtacgactgatagttgtgatgtagtcctggtatatctatttaagagcatatctatttaagagcatatctaatgaaaattgtagagcataaagagcaggggctaaaatatattaaggtaatggaagctggccgttcagcagcaagcgaatgttatcggaagactcttcatctgccttctcggttcacaagtgatcattgaacttggacaagttttcgcagctatttcgcaattttcacagtatggattttatacagaatatttctgtagatcaattttcagttgccacaggatttctctattcttacttcaagcaagttgttatcccatataattgcaacatattctttatagatcatcataactggatttactatttcgttttcattttaacttcttgttacttttttcatatttttccagatgctgctgcagttggaaaagattaccaaatcattggagaacatttctatagatccagatagcaaagatcaacaagaagaaacacccctcatagttttgcaagatgagcactccccagatatagatccagattcaagcaagcttctgtcagtagacgagaaaacagttcaattggttcaacttgtagctgattatgagcagagagccaaccacagtttccgactcaactatatcaacggctttcttaatctcagtcgagccaattacaacgccggtagtttcagtaaacggttcggatccgataaattcgatttgagaccatacaaggcatgtaaggatatagttgttgatgagaaaagtcttagattcactgtaactgaccgtttggctcaacagaaagcagcagaatcgaaaccagcaaagatctcaagaacgtcttcctataatgagaagatcgctgacatcaccgagtctcacgagattgagatggacgagattgtcaaatccagaaccacttcgctgaagagaaatactggccttggcggtttgaaaaatcgtagaaccactgaaaaagacaggacttctgagaaagattcaaataattcagatcacaatgagaagatcaaacttatagatccaatataccaatttggagcattgactccgtaccaattgaagcaagcacaaggattcttttcttctgctttggaagattctgtggaattggcgaatattcagaagcagattgaagccttgataggagagataacgcaattacagaaatctgagccaaaagagaagatacaatcagaaacttagagcaggcactgggagtcatctacagggaagatattgctaattagttggagtaggaacgtttggttatgaagaatgatattaagcttcagattcaacagcgaaaggactaaaacgttgttctatttcttacaattcatttaataaggatactactttacattagggattatatagaatgcatacacaccaacaactactttgtcgttatagactatttctcaatgtcgctgtacaagtcactgtcattttcgtagtctgctgcgttaatttctggagcgtcgctgtcgctttcgttctcttcagccatggattcatcttcatcatcattttcaggctcttcgccggcttgtttggcctttcttctagccttcttagcttccttgacagcgtttttagccttcacagcttcttgttgctgggctcttctttctgctctcaacttttgtttcaaggcatgtttcttattcaactcgttctgctcagcttgagacttggagatgttggcgtggtagagtgtcttggacgaacctgtcaatccttcttcaattttcatgagagtcaagttgagtcgagggcccaattccgtgagtttgatggccctttttctggtagccgacactgtggcagagttttcttcggatgcatctgcaggcgtagaagtcctctttttgatattgttagcagtttcttcattcttaatttctactatagcatcgtcttccacctcagaatcagatgtgattccacctacagaatatggatcgagcaacaattcggaaacgtcagcgtttccagacatgttgggtaaatttttcttcaagttgtggtgcgaagtgatcaatttcttgacatttctgttctcctccaccaatttggtattgatggcatagtgtctgatgtcaatttctcctgtttccgcattcttattgatcatcaacactctcttgatagacgatactttagtctgttgcggctgtataggtggaaacatgttttgaaaaactgttatcatcaacttttcatgattgtctgtctcgttcatcttattcagaaagccattgagaacaagcaatggaggattcaaaaactcaggtgagtccttgcctacagacttagggtgtttgaggatctttctaacatctttcacaagcgaatatgtgtttactcggaactgaagggtaggacctctgggcatcttacctactctaagtgaaatattacccgtatcttctgattggttgaaaatgaacaaatcgctcactcctaaaggtccagccatgacgataaaatcctttaacttgttcagttttctttccctcaaattaatggcagtgtgaggctgcatgatgtttctgaagtctttcaccaactgagacaaggaatggtttctaagcgacgagcctagtctaagaaccatagatctggggatcttggccaactcttcctcagacacctttctatgggttctgtttttcgttcttctcttggccatttatgctatttatacacttcagaaggtagaaatcccaagaattgcacctttttacgtcttgcctaaaagtgaaaagtactctatgattcgctccatacaaataaaaattcatatctcatcgcagtaggtcacgtgtacaatctgaaaaattatataatgtacagtagtataacttgatttttaaaatagattcttcatatatagagaaagaagatttctttacaaacacacgcaagatatacctaagagaccatggcaatcgtaggatctaacagtgtctccaagaagcctaagcacacaaaaaggaacgatgctcgcgatttggcagagaaaataaagagaaacgctttgaagaagcaggagcaagacaagaaacaacagcttgaagaagaaagcaagcccgaaagttctcaaaagtccaaaaacatcgtagaagtgaatcccgatgacgaagtcaaattcagcactttttctgaattgaaacttgttccagaacttttagaagctatacaacagatgaagttttccaagcctacacccattcagtctgaagccattcctcatgctttggaaggcaaggacatcattggattagcgcaaactggttccggtaagactgctgcatttgccattcctattcttcaatcgttgtgggaagcacagacaccatattttggacttgtattggctccagccagagagttggcatatcaaatcaaagaaacattcgatgctcttggttccaccatgggagttagaactgtttgtcttgtaggaggaatggatatgatggaccaggctagggacttaatgagaaaaccacacattatcattgctacacctggtagaatcatggatcatttggagcataccaagggcttctcacttaagatgttgaaatattttgttatggacgaagccgataagcttttggatttggagtttggaccagttttggacaaaatcttgaagcagattccttccaaaagaacaacatacttattttctgctactatgacaaacaagattgagaagttacagagggcctcattgcacaacccagtgagagtagcggtgtccagcaagtaccagactgccgacaacttgatccagctgatgatgcttgtcagtgacgggtacaaaaatacctacttgatccacttgttgaacgagtttgtagggaaatccattatcatttttgccagaaccagagcgcatactcagagaacttccattctctgtagaatcctaggattttctgctgtgcctttacatggagatttaacccaggctcaacgtttgggttcgttgaacaagttcaaatcaggcactgccaatatcttgattgcaactgatgttgcagcaagaggattagatatcccttcagtagatgtggttattaattacgatattcctactgattcaaaagcatacgttcacagagtaggcagaactgctcgtgctggaagatctggtaaatcgatttctctagtcacccagtatgacttggaaatgtatctacgtattgaacagctgatccagaaaaagttgcctaaagatccttccccaccaaaggcaatgttggatgctttgcatgtccacgttgatagggcctatgctgaagctatcagacaaacaaaggagttccatgagaagaccagaaggggcagaagaggtaaggacgacaaggatagagaagaacactagagcatcagtgctaaagcactacaaatagcattaacttgtaatatattaggatacatagtcagatgaaaatatataatcagagtacaatacacgagcaataaaccacaataaaacatatagaaacccttccaagcgtgcaatctatgaagtaaaacaaccaacctaaccgtatgacaatggaatagtataaatgagaaagaaagagccggaaacagtgagaaaaagacattaaacgaacgaatattaaatatatggcaaaagtaggtttctacttgtgcaagaaatgaacaggacattcaccgtagcccttcttgttgaaccaatctttgatacacttatagtggaacacgcacaagcattccaagcgaccaaccttatctcctggctttaggtcttccaaacatatgacacattcattatcaatgacatcatcgtacgaaatcttttcagcagaaggctggatggtggaagttgaagtcacggatcctataatcgtatccaactgagaaaattcgacttgctcaccttcctgaccagtcagcgaagaaggcgaaatgcctcctgattgagagttgtgaactgaatcatgaaccgtggcttcttctgacgttccatcagaaatgggggcttcgtcaataatagggattgtctcatacttaggtttgggaatagggggaatgttgtagaccaacattttgttcctaggatgagaatgatggtttgactctggtgagttgaagcgttggttttctgtattgaaatcgaaatgagtcaaacagtcgttgatgtgagtttctttaaaagcgtcaaagtcttcatgagaaatctcatcgattctacgtttatgtgcattgatataaagcttgagcaaatcagtagcgcataccggacacaagttgagatcagactcagtatcgtccgaaccagccgctgccagggttccccctcttccatgaatacgacgatggtgagaatgtgcgagattagtggcggaagagtttgtcgaagagtctacaattctggtatgagttctggtagagtatttagtggttgaatcgttatcatgatcgtgataatggatgtggtcacgttcatgttcatgactatgaggatcgaagtaattcatcacatttagcgaagacgaagagctgttgatgctgttgttgtctactgacagatttgtagtaaacaacgctctcctaatcatacgaatctcatccacacactcatcacacgtacgaaacatctcgaacgaggtatccacaactcgagaaccatgaggactaaccacataagtgttgggaaagtacttcaccggtctatcagaacaggatgcacatactacacggccacatttgcggcaatgatgccttcggttgaagaacgtgtagtgtgaatggcacaagaaacaggcagaaacagccaagtcgtcttgccatgtggcagcaccgtttgcgtcgaaggtagaggtgctcatattgggaacattagagacagttggtgaaaaactggcttgataattttggatattttaggaatcttggcttgagggccctagatattgaatcagaaaagatactattatatgattagatgccgttcaactcttgaaatggcaactcgagatactggttttggttaagtaaactgagtatgatagtgttctgaagattctgaaacagatctgaaacttatgaactttagttgatctgacagaattacactattgaattcaagcagatgtctcttatgggcacaattctggctatacttgactaacttttatggtggtaattgtgatgtcgtatgactctctgttactgtggcaaacaatcaaatctaaaacgacaaaagcaaaaagctagacaaagcgtaagattttatatgagaatcttttcgcaaacacgtacaccttaaatatctagtctcttttggcttcaaaatcttgtatggtggggattttattgaatctagtatttctcaatatgtcagaagacactagataagcaaacctggagaagcgagttatacaaagacaaaaattttggaatgtagtgggctaattctgtaaggcaaacaaagattggatacacgacttagttctggtctttttgctgaagccgatacagaaaagttggaaagcttgagaaaaagaagaattgtggacttcttttacaaatctggaaatcgagtctgtttagcctgttagcctaaggatattctggaactgcaggtactgttatcaggtggttgtggcacgaacgacccaccaggagacattacgacattgtgatgttaagagattgcgacattgtgcatgataaaatctttttgcacccaaatgtggatgggcgtactatagatcttagagaagttgttggtgaacaatcaccagaaaatgatagagtatcgtatcagatctagaaactctgagtttgagaaccgattaccgcaaaactatggaagaattgtaatatgatttttgtttgaattacagaaacaaatcaaaactgaaaattgtagaaaatttcgttggatcggctgtaactcagtatcagtttaaatgactatattctgttattatggcagctacacttcagaaactttgcagttgcctataccaatttcattgatcaataacaaagcatgttgtaagaaatgacgaaagcgagtcgtgaaccctagaaaatttcatgggtgaagaaccaattatgagcttacaatttttgttaaaagcatttataaacttgggacaggagatggacacatgtattaatcgtcattcatcagctctatctgtatctaaacataaataattgctcattcaaaattgcgcctatgatgtagttttttgcgcgacaaaaaagtacctttctgtggaacccttttcgcagccatttgtatgtgattggcgctaatcataattggaactttctcttcccgtctttcatcaagacgaacaccactattttatagtgtccgtgtttaaagtgttaacattctatagcatctatagatagcagcttcaggctaccacgacttcgcacacatccgatcagtttgacatattcatttctatcatcctaaagcagatttcctttcagagaggaaattattccaaaaattaccccatagaaccgagaccgacctaggtaaggctggacgtcatccttaattaataccctcagagcccccaagtatatctattcattgtcaagcctttccccatacagcagtgttcgccggcaaagtctcctaaattcatttgaaaactaaactattgtggacaaagaatcgttccacaaatagcgcttagtgtcagtgatggttataactagtggtgagtcacttttgcaagctgtgcccacagattaataaattcagaaagaactctatcttccagcgaaagatcagaagtaacttgtggttcttctggtgataaactggttttgtggatagccttctgtctttcacagttctgtaagcttccaatgaaatttggccactaataacatctggaggtagctggatactcatagaggaagagtatttagaatagacaaggcacgtctattcttctaatattcatgagggattgtcagtcttggatgaggatccatgttggaaatgagctgtggctaggatagaccaaagtttgtcttttgacattcacttcacgctagcgtactaaggttctatttgattgtcgcaatctggtctatatgtacttgacgtttgggatcttgctttagaggcctgttgctgctttgctacttgttcaagtttaagtaactgattgttcaaaaccgtcgtggctggggcgtagatttccatgcaaattatagatttgtaggatatatagtggtttttggggctctatcctaattggggtggaccttacttctctccgctgtgggagaggcaaagggaaatcctatcattagggtagagtgaatttggtgggtccctacggtcagtccattgactgattttagtccacctagaatgacggcgaagcacggttcggccgaaatggacatttccaaaatttgctagcctaacaaaccacgaagttcggtgacaaggtagcgcagttttagctaaaatcatcataaatctatcttagtgtaagtaaataaccaccaatcaagtatgcctcataattacatggtctcggcctatactcaggtaatttttgaaaagattaaaatgatcctttgagcataactggtgatttcgttgtccccatagttaagaacacacaaatgggaaatgggtgcaaattttttctagtgttttttcagatagtcaaagaagagctcaattctccaataagcgtatgggtgaacgatattaccatctaggtattggagtgaaacactatatttagtactatagatgggtgttcgtgacttttgaaataggagtatatataggtctagaactataatattctgctgtattttcctcaaatttgagtataatagaagagttaatatataaattatatattggaaacagtaggaataaacaacaggaacttgtataccaagggtatatccctgtctcggtatgtaatttagaactttgcgccataccctgtttaaaaatgagtagattcagtttctattcaaggaaagaacgatcctgcataacttccaacaaatatttgaaatatacaattttcaactttaacaaagcactattgaacattaattttcgaattttcaagctacaattcatccgtttgtaagtttaactgggttgggatagtaattgcatgattattagtaaaatttgctttcctggaacttcatacgactctttttgattcatacttcatacatcacattgtgctatcagctgctcataaatagtacttcaaactatttcacaagatccctctagtagaaccattgcattctcagttatatactgttctatcaataggatctcactactgcaagatctcaattttagaaagttctcaaataactttcttttaataaagtcactactgataagatatggctgatagactcacacagcttcaaacctgtctcgaccaactcgttgagcagtttaatgccaccgtaaattacatcaacacgagcagtgaaccttctttacttgatgaggatccgacttctgtctcaaacattgccgctagtgccccccttccaggtcaacagaaccagcagaatcaacaaaaccagcaactgaatcaacaactgccagcagctaaccagacacaacagggtagcactttgggaagtaacagacagacggtttcaccatcgactcaagcggaagccgagtcgaattttgagaatactataaacgaactatccacagacatcatcttgaagtctagacaaatcagtatgctcatagactcgttgccaggaataggagtttcgcctgagagtcagttgaagatcatcgacgacttgagcaaggagctccaaagtgtggaacaggagcaagtgaagaagatccaagaaaaagacaagttattgaaatggtgtgagtcattgattgtggaagtcgctactggtatttctgagacaagacattgagagtataaaaataatgaaactatgaatgaaagtaatgataaatagcccccataacagtagatgttctaattaaaaaagtatcttagaaatattagtagtaacttaacaagacgagatatacgtcttgtatcaattggtgattaatgaactccaacataattacaattacaatctacgacttcatgaaaaccgaaaactctatatataactcctatttagtatatgtcatgcaatcaaagtcccaggacgaaaaccattttgcgtggttgcactgagctcgtgtccaatcagtgccgtatatgattggtacaaatgcccaaaagcagtaacctgccattgcagctgttgcaaccatgagtaagtatccagttaagcgtctcttcgaaatctggtattctataaactgtgcaatcaaaagaatcgaaaagtaaagtgctggaagataatgatgcataaagagttgtctcttcatgtagaatgctgggaagtagtgtaggagccatccgaggataaactcaaagcaaaactggtaaaacacactagaactgagtgtttctccggttatgacgaatgggtttaaatgcttcaagtagtagaaaaagagctttgccattcctaatgtgatgataaagaatccgatccagtagatggccatgttgcccaacaaatatacatggctaccttgttcgtctgttaacttattctcattctcgttgctgtaaaagctgattcctctcatgacaaagggccaagactcaggacgagaagaatacacatgttccgacttaaatgtgctgttgattctgaccatcgctttcagatactcccagagcttgctgaaaaatccaaatggggtgaaatgtactcttgggtgaacggtgctgttgtcgagaacaggatgtgagttctcttcaatgtaccacaaagtgttaggaattgtaggctcatcaacacacaaaacttcgttctgttcaaagccccaattgggaagtttgtccagatggctcatcatcacacacttggttccatggtgaactaattggaaaatcgattccgtagctcttaacttgatcataggcaaattgttctgtgaatggggcttcttgttcatgatccggaccttgaactcgtagttgatgtcaccaagaagttctctagaaccactacaagacacttcattggagtagtcgtgctcagaaatcggaggtctgatatcgtttacatgtaaatattttcctgtttgtttgtggaataatcggatagtatcgccatcaagaactgctttgaaattcttttgcaattgtccttctcttgccttgttcttcgtttcgatgatccactcgttattttcatcaggactgaacccatagagagaaacctgttgttcctggctccctccaggataattgtgatcgtgtgaatgaaggtattcttccaagttgttgtgttttatagtcaccgtgcttccgtaggatacttccactggttcgttggtaaggaaatccgaatcaagcaatgttgatttgaagattgggctcatggctccggagccactgccgttgaatggcaagctgaggaaatgaaggtagaatacagaaaggtagatagtcacaggaacgcacacaagggctacaaaccgagctgcaaaatgggtataccattgtctcattgttacgtttaagtcgcccaagtaatcccagagttcaacaatcgtcaataagcccacccaggcgatagtgtaaagtcctgtgagttttgtggaaactgtcattccaagacccatacctgctaatagcaagcttttgaaccattgcttagtgaatggctggcacactctttgcttcatgagtccgtagatcgaaatagacataaaaaacaaaagcggactgtcaagcaagatgaatctggactgtgttacaagagaattctcgataagaaccaaaaacgctccaaaaagggccacaaaagatctgcaattggtcaagcgaagtgtcaaaaacgtcaatacgacagtgaaaatgccacacaaggccggaaataacctcatgataacatatgggacatctttatcatataagtttccaatttcttcaaacgtgaactggccattccagccgaaaagaacagcgatccaatagtagatgagcttgacgagcggtggatggacatctaaaaagaattcgcccgcaaaataatccttagcaaagcctccaaaatgaacttcgtcgaagaccaccctcgtaggaaatggtagcttatatagtctaactagcactgaagccagaagtagcactgctataaggaagtggtcgaattttgtgagaacagtccctgaaattcgactaggctccctttcggtgctgtggtaaacacggcgacttccgaccttgtaaccgggaggcaactggtagggcttctcggaatacagcatggtctggaaggctctttatagtggaaatgaagatgtggtttgatccgaaaaaatggctatagctgaaaaattggaaaatcgttatgccgaggcaatgtgcagggcttaaatggtacgtcttggaaggggcttctgggaattgcgtagccgaagaaacttgcagtatacgtagcaccaactccttttacagacttgtaggaattgaaacttaggttgggagccatcaattacaatgaaccaggtgaatagcacactcttgaaaaagattcaggaattgttcgggagattccgcgattatctacgcggtcggtaatctagacaaatagtggaaaaaataaatacacaaatatgtacgtgttcaaggaattttttaatatgaagataattaaatatgggaataaactcctacttaagccaattttgctataataatcaaaaacagatcgcacaatcagcaagcatgacaaatatataatatttcaaaattttgactgtcgacattctctaattgttgcagttttcaaatgaaatttgcacccgtttatgcagctcagtacctcaattgcacacaaaagatatatgcaattgggtcttatactacaattgtttgtcaaggattactcctgcttatgcttatgtctatttgtagtctccttgtactagatcttgactaactttgtgtagatacttcttgtcccattctataataactgttttggtatgaagttttttatccacagtttttgaagaatttcatcattaccaaccaaggctacacactgctttaacaaattctattcttgttgctcatgtgaaggatatttatacttgttctttctgatctcaaataggctgctgcatctcttgtagatgtagtgcaacattccaagcgagttacaaattgtaattaggatcaaagctactccatatatggcacttacaactctgaaaaactctattttgtagcctccaacagttcccctggaatgctctatgttggccaacgacatcgttccgatagggaaattcatggaccaaaacgacttgtgccatactaataggccggtttttgaagaagagtacgttggatttggagttttggcgaagggttttatcttggataacacagaaccgattgctagtagagtcaaaaggtatccaaatgacattaatacgaacgaaacaagaccgcaagctactgtgaatgactcggcaatattgtggttaggaatcatttgcgacatattctttccgaaaagcataatgaaataacttagctggccaacgtaaccaattggaagaaagagggcaaacactgaggcggaatcgggaattttgtatatcatcattcggagcataactattggaattaagattaaaccaaaacagcagcaaatactccagagtgccaaactgaccaactctgttacaattcttaactccaaagtaggtaaacttggagcaattgtttctccattcgaagcaacgacaacgaacgtaacgggcaataatattgcagtaaaatttacgtcttgtaaggtgtacttcttacttaattttgagaaataggataggtagaatatgacataacagtacattgacaagaagactgcaatccaccataaagtccacacaaagatggcatgtttctcacctacaagatggtgaataaatgttattatcgtgatgaatcccatgacaaaagcgccgataaatgacgactttcttcggtcggtatgataagcatatattctctctcggtgatagcagcaccctattatgaataaactcaaatttgcaagaaagaaaaatacagcgaaagcaaagaatattataccgcatattctgagccaacgagaagggtatgggaattcatagcagatgttagccgagattgcaaatcctatgataatagcaaaataggctgtatcgaatttttcaactagttcaagcttgagaagagacttcaatcttgtcgggaaatctccttgttctgatgttgaactagacgattcctcctcttcatcttcttcaatttcttcgtactttcgattacgctgtatcctctcctcgtaatcctggttctcaaataggtctatagagttgttcataacattacgttgaatttttaaaattggctgcgaagatccccatttgcccaaaagggagtacttatatataaaaactgtgctgagaatgaaaatattacggccattcggagcctttgcagcttaagctacgcatacggaattggtataatatccacgctggtacagtaagaaatgctactcatttcgagaccctgttgaccgagtaacttgcaagaattagtcagcacccgcatagaaaagtaccatagcacccacagaggctttcatctaaatttttgtgacaacaatcttgatgactctgttccctgatttaggtgcaagcggctagtttaggtgtaacggacatttgacatgttccgtggatatttattttctccgcctgcgatgcactacctcaaaataataaagtaaatcgcagtttgagtatgtccattgtcaaagacgaagcgccgaacagggccagattcacttgaggatatgacaacgactaatttcattgcttgtagattgttcttatgtaactgtaaatagtcttttcataaagttcatatactttaattcaagtgaatttcggtaccgaagacgaattcaactccgattgaagtgcgagttcctgctattttcaatcaagcatgtgccttaagccgttgtaaatgcctacgctatgacagtatgatagattatatttaggataaccaccctatatagacaattacgaagaaaaactgtgaagtaaatgttttgggcttggtgcccatgacggtaattaataatttaatcacgctaaagaagcgtatactaagctgtctttagttcttctgtctcggggttgaaaagttcgacagccaagtcgtaccagtaggcgagaacccccatgacgttgtagatggtgaaaaggaataatgtcaccgaatacatgcaagcgacaaccgtgaagaatttgagcgggtaatttcctacaactcctttaccaatttcggtactggccaaagacattgttccgagagggaaattaacggcccagaaccctttgttccacataatgtggccatactttggatgagtgaactggggatttggtttcttggtaaatggtctgatcttcgataaaacggataagatccctacaaatgtcatatagtagccaaatgcacaaacaacagttgcgaaaagagcacaactaactaagaacgaggttccaagaactttgtcggggatacgttcatacatgttaaccccaaaaaggaaaagactgtacgatgtttgtccaagaagacctatgggcaagagattagttaaaataagcgcagtattcggaattctgtggatcattattctggcaaggtagatgggcataaaggaaacacccatacctacacaaataccccaaagtagaaagctgcacacctctgtaatgacaaaatggttcaatgaaggcaacgacattgatatgagatgtccactggaagacgccactgccaaagtaacaaccggtaacaaagaaaccgagtgcatatgttcaagttttgtaggtttattcaacttggagaacgtcccaaaaaagtatatgacaagactacaatagacagacatgaatacagcaatccaccataacacccagagaagcatactgtgatgggaaccaacaagcaaacgaatgaagttgactataacaatatagcccataacgtaggtggacataaaaactgagtgcaacggatgaacgtggtattcgactattcttgatgggtagtaatagaagccaattagacaactgaaagttaagactagaaacacgagtacattcgtaccgaacacaattttgccaataatctggagccagttcgctggatatggaaaaagggagcacatcacggcagttattccaagacccaaaatggttgcgaaatatgctggaacgaatttttctatgagctcgcgaaagaggagttctcttaatctggtgaggaatggcttctgtactgttgtctggccatatttaatcggagtacctgaaggtgttgaagagtctccgtcttctacattgacttcgttgtctatattttcgttttcttccaagtctgctacgtctttgttcagagagggaaagctttgcagctccaaatctttatgctgtaactccgacattgctttaaatccatatagttgttagaaatcttgtgaaattggaaatttctgaatactgtagacctagtagagaatatttcaccctgtttcaagggggcaactccgaagccttttattcattctaaggtcaactctaccccgaagtttgaccggatttatgctccatatgaacaccttaagtcctgttttgtgatccctttttttacggctccggggatattggtgaaacaccagagcggtgcaaggctgaccctaagtcctttttaccagagccgagttgacaggtaaaatgtttatttttgacacacagaaggtcagaaacttttcttgtcgcttcacgcaacggtctttatcttatttccgatgactgatctgagataatattaagaatattcacaatgcgtctggttttttgaaccaagactctatatccaatttcttttagtttgatgatttctcagcaggtggaaacccgttgccaatcttgtagatacaatcatggttgttcatttgtaacaagtacatttgtataattatttgagaaatctatattacaaatcgaaaccaactgaaaactgtattaacaattaaataaatctataccattgtctgagcatctgatttttcagatctcttgacaaacaaactcttgatgcaattataaatatataccacgatgcctaccaagcagataatggtaatggagaacaaacaaatagcaaaaatgcagctcatgatcttgaaaaaaggcaacggatagttccccacaattccttttgatatttcgaagttggataatgacattgtcccacaagggaaagtcatggcccaccaagacttgttccacttcattaaaccgctcttggtcatgaaggactcattcggcttacgggcaaatggctttactttggacaagattgaacacacagcgatgaatgtcataaagtagccaaaagacaagagaaataatgaaacgagtgccgaggtcaccaaaaacgaatgtccaagataagcgtctggaatcaactggtacatattagctccgaaaagcataatgctgtagctgctttgtcccaagaagcctactggcaaccagctggagaaaaccaaccccgtgttgggaattttgaaaataattagtctagcgaagtagatggcaatgattatgaatgcaagtgctatggaaatcatccagagcatcaaactgaacaattccgtgatgaccttctgttgcaaagttagcaagttgggggtaatcatgtggccgctggaggaaaccacggtgatggcaactatgggcaacaataaagtagcagtaatgttctttggctcaaattgttggttcgctttcgacatgaaagagaagaaaacaatcacaaatgccgtgtaaactgaaaggaaaatcgctatccaccataaaacccacacaaagattatgtgttcgtgtccaactagggagtggataaagttgataattgtgatgtagcccatgacatagcagcccatgaataccgctatggttggatctgcgtggtactgtctgattctttcgcgatgacaggagcagctcactatcgtcattgcagtcgtcgtcaaaaggagtacgaccgctatgccaaacatgatatttccacataccctgagccaatgggctggatatgggaaattgtacaagatattcagagaaatgcccgttcccatgatggaaacatagtagaccggcgtaaagttgtcggcaaactcgtgcttcactagcttgctgaatctggctgcaaaattattagccgccagtaaagttgcgctcgtaagggtggattcgtcttcagtttgcgttgcagccatagttatgctttgtggatatgcaggagcagccacagtttgtcgactgtggttctccattatgtatgaatcttaatgaaaactagatctgataagatagacttcagaatggttgcaaaataagaaatggggtttgctgttgtgcaaatgtgagcagataaacaagtgtggccaactttattggcaaataccgtgataaatgcacggaaacagttggttcatataccaactacggaacttgtcgctggtttcaaaccccgttttctggcgtgaaaaaagaaagtctctcatagttaagagtcatcgctctgctgtatgtcttaccaatactgcatacagacaatatgcatacccacgttacacaacttgagggaatatcacgcaattacgtatgaccacatggaggtacgtcgagcggtggtttccgcattcggtaggtgccgacgagatgccgcataatgacaattaggaaatgtcggatcttctggcgggctacatttcgcaaacatatacgatacgaagataagaaacacgtagaagggagaaagccccgacggcagctactgggatgtgtagtcgtgcgaatgatatagtgtcattgttgttctaagccaattgtagatccgagggttttcctcaggagaattacgccagctcagacacttttcagattctcagtattttcttcataacaagaattattagaaaagtgtaaccttaaactagactctaaatagtgtctgtttcgtctgctgcccagacaaccaactacaatggcccataaataattgctaactatgacgtggcagatttcagcgggtgatacgaggtcgtacattggctaaaacatccctaaacggcaatatgtcgggatgaatgacccgctgtttacggtttgagcacgactcaataggccccgctatacaaacggccgccgcattacctttgtgggcataaaaaattatgcaattctgtactgttttactccatcaaaaaaaatatgcgacacaagactcagaatcataaccttaataccatcagactttttccagtataagtatctcccattttccctcagataaattacaggattctcttccattgctagactggtttactgccatcagaaaacctcacattacttaccccaggttggttaacgtaactatcaccacttgtacctctattccactgctcaggttctactctcagcgggaaagcatttcaccataactcatttgaaaccgtccttgtttgatacttcttacggacatgcttacactcacaagcgccaatcacttcgaaagaccctctactccgaactcggtggccgcacctggaactgcgggttccaatgcttcctgtggatccgctcatatgagctctccgcgggttgctgttgaaggacccgctgtcaatgtggattctactactatcgattgcatatctcccgatagtgacttctatgtcttgatccagcagctcaagctgttgttgggcaaagacaagggccttgcttctgaagatatcgacatcaatgaagtgagaaggatcatggaaaactatacttccaacgatatggactggttaaaaatggcattgcacgatgtgtccagaaactactccagaaatggaattatcaacatcaacaacaatgccaacttgctcatattggtgtggtctccaggaaagtctagcgctatccatgaccacgccaaagctcactgctgtatgaagatcttgtctggcgaattggttgagtctctctatgaatttccacaagatgaaggtagccatatgaagtgtgtcaaacagacaaccatgcacagagatgaagtaggttacatttcggacaatatcggcttgcacaagatctccaatcctcagtcagataaagtgtctgtatctttgcatttgtatactccaccatatgcttccatgtacggctgctcgatgtatgaggcagccaacggaagaaagcaccatgtggacatgagcaagtactacagttggcagggccaattgatcaatcccaaagacagtctgacatgctaaagagaaagtcatagggatagtaaggcaatgatgggatatatattttgtaataggttaattaacgaaagcattcataaagatcccatatatcgtagaggtgttatcgccattttggcagtcatttcgcatgtaattattataatgtgagcataagaagtcttcttggttggtgtcgatagatttagaagcttgtagatgctagtatctatcgttttaaaaacacgaggaccttggaaggcgcttcagtaggttgtaaaggatcattcttcgtaaagcttactgaattccgtaccaccagaaggaccaggaggaacctgaagccagtttaagttatcgtaattggctgtaccgtcgatgacatggaatgcgtatgcaaatctggatttgttcgaatggttcttttctgacttatgcaatacagagttatgaatcaagatcaatgaaccagccttacactcgactatcttatagtcttcgggactctccttaacaggaacttccttcgctatgtctataaaattacatcctttgcttccaccatctaccttaacgaatcgcttgtgaacgggataaaccttatgagatcctggaagatactgtaagcatccgtttacaatagtacaatcctcaagagcataccagaatccaatagctgatagtggttcagtgtacaagaaggtggcatcagtatgaggaggaacagcattgtctctttcgttcgatacatcagcttttgcaggctgtttgaaaatcaacatgctttgcaacacccgaggatcgacatagtccaacgacttggcaatagctttgactttttcgtcaaaagtgatcttgtgaaaaagcgaatctttcatatgtaatccatggccaatcttgttaatagcctgctgaacaggatactgtaagtttccgtttttgtcgaatgcatctgtgtcaaaaaagaacccgatcttatcagatgaattgaagaagtattcgtctccaatgtgatcattgtcgtcagttttgaactgagttcggggatgttcttctattttgaaatcctggagaagttcgtgagaacgatctaaaagttgtgagatttcgtgtttcgtgagaaaatcaggaatacaaatcattccttcatctctgtactgcttaacctgctcttcattaagacctaacattcttgcttaagtagtaattaatagctagtcttcgaagaatagatttcttatcagctgttatatagaaatgtttatcctgcatgttgtcggagccgctcaatcacgagtgttccaaatcaggcaatctggggcctttcaacgaagaaagaataggcattttgattctacggatgttattgagacaacttccagggaagagaaatgttaaatccctctcggatgccaaatatgcttggggatttagaaattgcaaaaagtgataaagagaatttaagtatacttcttgtgtaaagttagtgctctttgtcttagatctatagccaataatgaactacagtttcttcccaataccttctttctctcttttcgtatgtattaggttcttgtaaagttaaatctactgttattcaatggtgaacttatagactcctgtagattaacgaccaaatcttttcaattcccagtatctcaagaatggatagaccactccagtgaacccaccacagagccacatacctacgtcaccactgtagtctccaatcttcttagcaattgggccctggaaatatacttggttcattcccaaaacagcaccaacaactccaattgcaaatgaaaggtcagctgctaaacccatagtgatacccttgggcttgttccagtttgaccagttgtaactccaatcactgttggccttttcgtcaaattcgttatggtgaagagtcttggttttgatggaggatctaaagaagatgttttcttccaaaagaatagttatatacatagagatccagtagcccaacataggtaagaagttgcttagaattgtggaaaagtgttctttaccggcgacactcaaaacaacatagataatagtcatgacaatagcccaacaccaacgagggatataagcaagctttctgtcgatcaattggaactcaaaggcaacagaataggtattcatgatgttattacagataagggagatatagagtagaaccacgataaacagaccgaatcttccccaaggcttgaagcattcgttgatcaaccctccaataccgaaattgttgtaggcatcattccacggttgataagcataagcaatagagccacaaatagtcccgatgatagcaacaaaagtggatggtacggcaatcccaaggaaggtcacaataaaaatttggtagcttggggtttcctcgggaaataagatgtagtaatcggaagctccagaaccccatgtagctgtgacagagtatccaatagcaaagaatgataaccagttaccacgaacggtcaatccggaaaatccttgttcagcaaccaagacgttggattcatgtacgtagtcaactttcttaagtactacaacataaaacaaaatcgaagctatgatcaagggaatagacaagatggtttggaaattgagaagaactctaataccaaagatagcaatcaccaaactgattactcctataattacaataccaacagataatggaatattgttattgatagcaatcaatatctgaccaccaagaacacaattgactacggaccaaccaattcctccaacaatgcagattaatgaaacgaacttgactccccattgaccaaacaaaaatctagctcccaccatctgacgacaaccagactttggacccatagtggaacagtatgctggaaccaaacatccgaggttcatagaaatcaacccacagattaaactgtctttcatgctcaaaccgaacaataatgtggggagaaagaaggatgacatcgtagttaaacctccacaggcagcaatccaaagtccaaagacatgcaaaaaacgatttaaagaagatttgttagcagccaaagatcttctttcttcagtggatactctttctatccctctagtctcgatgccaaagttatccaacttgtagatccaagagatatacttgggaggtgcaaacagagcagagtcttcacttccattctcaaaatctctggaaataacaaatttttcctttttgctttcgatatccatgattgtagatactggttatttactacttcatctcaaaagaacaactaagttgctcctgggatctttaaatgaatccttggtggtggaagtgaaaaattaatttatctggctgtattccgttaagcgcatatttcaatatgggccatataaaatgctagtaccaacccaaaattacaacaatgtgtatttattcccaggcaatgtccataaatgtagaagtcagactctttttgtagtctcctgttggtagctacaagtacgaagaaaatgtctatcattgaagaattattggagaagcaccatgaaaaatttatccagtcgatcactcaccctttaaccaatgagttgtgcaaggggactttggccgattaccgcttgttcacttatttgactcaagacttgaagtttttccagattgggttgaatttgtttggcaaagttttggcctactgtgacgattccaaggctgccattacacttggaaagcagatagggtttatttccaatgacgaaaacgactacttcttcaaatgcttagaacaattgaaggatgaaagcttacatgagctacagaacaaggtgtcgcaaatgctacttgaacagccaataactcttccagaagtacagaagtacaatgaattgcttaccgagcttacttatgaaagcaaatcctacgttgagctcattacgtatatgtacacaatggaaaaggtatatctaggttgggctgactacagcattgataacaagttaatacctgccaacatcacctacaaacataaggagtggatcagattacacagtggagacgatttctccaactgggtagcatttctcaagagtgaagtggacagggttgtgaaatcgccagaagatagagaaatcagtgaaagagtgtttgtcagggccttggatcacgagattgcattcttcaatgcttgctataactatgacgaacagtaaatacaccctatatcattaccagaagtatttaaaatcagaatatatacgctgaatctattagtaaagtaatattgcttgattttaggatacggagaactgagaagtctcccgcgctctggtaatttttcaactattagtatactatgcgtttaaggcgcccacaggagaataaacccaataataagttctgcttttcttgtctacttggacaagtgagctccgaaacttccttttggggtctgctattggcgtagacattcaacaaggagcaaatatcggaaatctcttcccctgttcacctgtaaacttttaggaggctccacgtagaaagtgtcaaatgcacttacagtgctctttttctatctgtactgtactgttcttggtgacgtaatatattagctaattattggctgcaacatttttatctaagaactagcttatgcaattacagggacagttcctgagttatttcttagcttcttcttatagaagacggaatactcttttcctctgcggatgccatagactcgtgggttagattgaatgctgtttcaatatctagaaagaatataaatatggggtgaaattctcaagattgactattctcaattataattcattgtaatccaaatacattctgagatgtctaccgaaaagatttctttcttgcttaattggcagccaactccataccatattcctatctatattgcccaaaccaagggctacttcaaggaacaaggtattgatgtttcaatcttggagccatccaacccttctgatgttactgagctcattggttctggaaaaattgacatgggattgaaggctatggttcacactttggctgcaaaagccagaggtttccctgtcacatcaattggttccttgttagacgaaccattcactggggtcttgtatttggaaggttctggaatcactgcagacttccaatctttgaaaggaaagagaattggctacgttggtgagtttggcaagatccaaatcgacgaattgaccaaacactacggaatgactccagaagactataccgctgtgagatgtggcatgaatgtagctaagtacattatcgaaggttccatcgatgctggtattggtattgaatgtattcagcaagtcgaattggaagactatctaagaaaacaaggaaggccaatttctgatgctaagatgttgagaatcgacaagttggctgaacttgggtgctgttgtttctgtactatcttgtacattgcaaatgacaacttcttaaaagagaaccctgaaaagattagaaagtttttgaaggcggtgaagaatgctaccgactttgttctcactaaccccaagcaggcttgggaggagtacagcgacttcaagccgcagatgacttcggaattgaacaacaaaatgttcgaaagatgtttcgcctacttctcagactcattgtacaatgtacatcgtgactggaagaaggtaactgcctatggtaagagattggatatcattcctcaggatttccagtccaactattcgaacgagtacttgtcttggccagaaccaaaggaagctgaggacccattggaagttcaaaggaagatggctgttcaccaggatgaatgtaaagcttgtggaggttacagaagattggttctttcgtagcccagcagatccaccccacagagacgtgaacgatccatacatacatacatacttttttgtgcccaccattatttcgttattcaatgaacacagctatatccaatacaatggttgtggttatattttagatgataataaatttcactatgttaagacttatattctatacattgtgtcggcataagctattcatatacattaaacatgtagtgccatcatatctgagtttaccctatatacaataaggtgggtaaactcccataaccagtctagtcagtatttttcagtttagagtattaactctacttgtagagaaaactaagtttcgacttctttctagcttctctttcctcttttgggataaaagcatcgatctgtttcttgatcttctctacgccttcagcagcagtggcttctctgccaattacatctacaaattgcccctcagagtccatcacataaaagaagatagagtggtccaccaagtagtcctggcccggcttgatatctgccggagtcaggaagtacactctgtatttcttgcaacagtttttaacttcgtcataagtaccagtcaagccaatgatatccggatgaaagtcttccaagtattgctctacaatttccggagagtctctggcggggtcgcatgtgatgaaaatcggttgcatctcaattttgctcttcttcaactcttccaacatgtcacccaatttgtctaattcatcaggacagacgtctgggcagtgagtgaagccaaagtaaattatagaaaacttcttgttgtcattgaccaaattcttgtgggtaaaaggttgccctttagtatcaatcaaactgaatggtcctccgatcaacggcttcccgatacttctcttggagtcaacctccttctgaatccggattctttccttttctttactgaaccaatacgttgctccacctcccaatactaagagcaaaagaacggccttccaggacgcaaactcgatactgctgttttcggcatacttctttccagagtccagagagcctatagctacacgactcaaaggtcttttcttcttggagcctggaacggggtttgaactatctgaaccagactggggaatctttggaatttcgttgaaacgcctcaacgaaataccgaaacttctcgctgaatacacaaccgactttctggtactcctgaacgcaattcgagacaacatgctgtataattggttgatattctgtagaagacagcaagaatatattctatagaaatcagattgaaatttgctcaatgaaaaacaggtgatttgatagtcacgtgatatatattaactagctatttaaatagtgacagtattattagtctttttgaacgatggtgtaactggaagataaaactcaggcacttgaaatctttggccgatctttgaatagtctctgaaaaagttcgttcagtggttctattcgtagctttatagtacttaatctgacgagaaaatattgcgaaaaagtgttgcagccattcttaagtatgtagaaagaagacaccattgaattgtgaactagtaattcacacatcaaggaaagaattggctatacaataaattgaattggctatgacgtttctacaaggtatatttatactatatgaaaccacataatcaattctgtaattcctccagagtatatagagatggaaagtcgtgcgaagactaatatgccatttaaatctaagatggcgtccctggttctttttgttcaatttctgttttctttaccaagatgtcgactttaggcaagattgatgagcttgtcagctggagcaagtcaaatggagctcttgtcagtcaaaatgtttcgttcaggcagatttctcctgggaatatcggcgctttctatggaagtagccatggagaagatgccaaacttgaaggatatcaaatgagattacccgtaaaacttgtagtgacgctttgtgatgccattgaatcctttcagaaagatagcgagggtgatttcaaagagatttctagacagacttccagtataaattcgttattgaagttgtatcttgcacgtgagagaagcagcaagtatttgacgtcttcgttctataagccatatttgcaattgcttcctactttgaaagatatcaactcgccttactgttggactgctgatgataaggacctccttaagggaaccaatctaggaaactctctcaaagagaatataggtcaattggtagaagaatggtggcaagttatcaatttgttaccagaatccgttgaaaagccagatgcccattttgtcaatatgaagttctactatgagttcaaattctacaaggacgaagacttgtacaattattttgtagttcagaatgaaaacgatgcagacaactggaccagttttccaaactatttgtgggcatcgttgattttgaaatctcggtcttttccagcctatttgttgaagtcggcagtcgatgctgatttcaaacgtgatgaggccatgcttttgcctcttgtagacttgttgaaccatgactcgaaggctaatgtaagctggtctgttgacgacaagtgcttcaacttcaagtcagactctgtagtacccaatgcccaattgtataacaactacggtttgaagggtaatgaggaactattgctagcatacggcttctgcattgaggataacgcatcagactctgtagctttaaaaatcaaaatccctcagcatcttatgtctgaattgcaaaagaacaatattaagttgccaactatagaagactataccacttctgtagttagaagtgataatgaaaaaaaggccaaaggggatgaatatgaggatggtgtactttttttcatcacaaacgacaacttgccagagaatttgctcgaggtatttcagtttttggtaaagaataaatgggaaaacaacggaataacattgagaatgaaattggccggattgaaccaattacgccaagctcttgaaagtaagaacaaccttttgaacaccgatattgttctgaagagtaacaatgctgccaccattaaaacttacatccagtcgcaaagaaagatatacttggccaatatcaagaaaatcaagagactcgagaaggaactattgtctgactctgaaaataaacctcatctcgtgacgttaaaaaatgtcttcaagaaagaccataagttccaacagtctctcttagtgagcttgggagtgtcgtcgtatgatgagattgtaaattcgcagtttctggatcaagcctggctcttgtatttgatcagatgctacaaccgcgacgaatatgttaatcctaatgaaagtgactctctcggagatgatgataactacttgcccaagtggataaaagacgcatttttgcgtgtagaaaaagaagaaggtgagcctagtgctgctgaggttgtacaatacaaggacttgtatcttggtttgattccacagttggctgagattgttcctgagatctacaacaggggtaaatggagagttcaggaacttatacggagtgccaagttgttggatacgattagttttgtacgtggcaaagagcaggagtgtattcttgtagagacagaatgatgtacatagaaaacttgtaaataatgaacaataatagagatgcttagacactactaatatcgtagacaggtatcgtacataaattattctttcgcaattgcattttgttcattttcgcagccgttttagctcggtatagtttttcacgttccacatatttcagtatagattagcataggtgattagaccataccatatagacttcattattgccaaacatttccatacagattggtggccacacaactgcactctaccataatctacaccgattttcacttccgaagttattcaagtgaattagagattcaagtttttattattaccggtttattaacgcaacgtacatacaatcgaagcgaagatgacaaatacctgctaggctatctaatcttccttgataccaccagcaccgctgatttcagcactttcgaccgaagccttgtcagtcttgacttcaccggctccaccggtcaaggcagacaaaaagcctggagcagccttgaaaggtctcttcaagtcgccggaggctggagttccaaacaagtggatcttgacgatgttggattcaaaagccgacttgacggaagaaacagactgcattaccaatgggttggtgtacttcatgtagagatgcatgaaacccatcatggccaaaccctgagctacacccttgagttgggcattgacctgctgcaagtcgtattccttgacagtggtgacgacagctctaggctcggattcgccagccatagggttggcaggctcgacgtacttcaaggtggtcaagtcgtttttggcgttgatcttggctctggtgaaaaggtagacccccaaggctatggcctggcaagacaagtaggccacacggacgtagaagagaatgtcggggttctccaagtccaaacgacgggacacttgcatcatgacaagcatgaccacgatgttggtgacggctgggttcattttgtagaattagacaatatgaataaacgaagaaaaatagaaaaagaagaatataagaaaagtagaaacaaaagaaaagtgaaaaatctgatttacaagagaaaaaaatcctgcggacgttgattatcgcgactcgttaatctacagccactatcgtttatcgccagcaaaattttcgtggaagggcacagaaggcggtagaaagtgacacaaaggaatagggtgcgaatggcacaagaagtacggaaatgctggtaaagattagcgagagatagtgaaaggcgcctgggtgaataacggaagataaggtgggctctggaagaatgtagaataagaaatttgttctggttggaaatagatagggaatttatttcggcgcacaaataaatgttctgttggtgacaataatttgtatggtcagaattcataaaatgattcccatcttagacagaaacacaattttagctttatctttctcttacagaacactaggtgcaagtcccattcaatttttctctttccttccttttccgagcccatccagcctaatattccagcctaatattgctattcttatcaccatatatttgagtgcctcatcaagctgtggctgcgaaactgctacggccgtgcggctcatatcgcttactgttgcaggctaacaagattcagccaactagatctaagctatcctaatgttctacgtctaccctgctcaatttgacaatatcagcgacaaatacccgttgaatgtactactctacgcttatcctacacatttcacctcttctctggaaatagtcacagtaaacgatcgaatttttattaacttttcgtaatcctacaatgttagaaagtgtcctcgtcatcaaaagacacatctccaaactcccagcatcccgaatgctgcgacttggccttgttctgaacagttactaactcgttgacatagtccttgacaggtggcttaacgttcttggtgtctacaatggcccaaccttcactgaccaattgcttgttaatggtgtaggtagagtccttcaacgactcttcggcatcatagaaaataccttcatattccacgcttgggttcgaagatggcaaagcactgatcaccaacttcttctcaaacgttaagtcttccaacgcatacaaggcatcagttaagtaatcagtaggagtcttaggaggtaatctcaagttctgtaacgtagccgtgtgagcgaaaacaggaaaagcctgcaagttgaactgggcaggcaacaaacgcaaggaattcaaaggaaccttgtccacgttgccgaaatccaagtgcttgacttcgtacttgttggaagccttgtcaaagttgacgaccttggctctgtagtacttgctgttttcagcaaattttgcactgactaactcacccttcttaggagccttggttaagttgtgaggcaaatctacagattgagtgctagcgctggggagcttgagatggaagtcgttaaactttttcttgaaatcgccaaacttggcaacagtggctccgtccaaatggtggaacgaaacaacaccagtgttgtctacatctacgatttcaacatcgaagaactttggcttcaacgattccaagttcaattcgttgagcttagcagcagtctggtccaactcagccttagcctttgctggatcatagccagcccagacaccctttttggatgattgagcagattcctcggccttgatcaattcaccagcaaacgaattggcattgatggctatttcgtgggtcttggtcaaaccctgttccaataaattgacttgtacaggagacaaactgttgttggatgcgtacaagttaccaatgaaagaaccgatcttgtcggtatcgtagatatcgaactctacggctctctgcaagaactttttgttcaaaaatttgacaccttgctctcccaaagcttcagatctttcgttggtcaaaccacccaagatcaacgtcaatttcaacccttccttagggttgaataacttgactctattgatagaaggcacgaattcgacgtagtagccagaaattctgcccttctgcttgaacccattgaagaatgtcttggcttttgcaaagttctcggaagcatcaataactcttgtgcctacggttaacaccttggtgatgtcaccgcttgtgaacaaaccctttttagcctgcttcttctgttcttcttcgatctcaatcaatctgtcccagttcaatgatctctcatgggaagtagccttgttatgtctgatgacagtagcccaaccgttttgtacaagcgtttcggacaagtcgatattattgttgtacttgaagctaaccaaaaatctagcgtcaaaacccaactctttattctcgtttctgtaaccatcgatgaagatagtaccagtcttgccaataacttgatgtctgacaaattcacgggctgtagaaacaagagcctgttgtttttggtggtctgaagtgatagtagtgtcgtttggtctggggcctctaatagaagcaagttgcactgtcaactcttcttcagaatgaggcaaacggataaccaaagtatccgcattgacaaccttggcaatctgaacattctcaatagtggagccaggctttaacgacttgctggaaacacctgaaccagcagtggaaccgcctgatggacgagtagaattggcatacaaacctttacctaaagctttagccgtttgctctgctcttctcaagcctcccattgcagaagagccaatcatggtcgattgccagtctacaatttctccaaggccctgttccaacaacttctcgtgaatgttgttgccagaggaatggtgaattaaagctattggaacccctgtctgagactcacctacaatggaaacagtcaattcggccttggttgtcaagagcttgtcttccacaaaggctttagcctgttgggctactttggtggtagcagcaggttggttaacgtcatcggttctcggagccttgataccagccaacaacaacgcagtggaaacgtgttggttttccttgacgatgatacgagccacaactctgtcaccactgatgactttttctacaatggccttgatcgggtacttctgtgacttgttgatgatgttttcagtaagagatacaagttcaatattttctgaactggtggtgttccacacgcccaagttgttcaatttggcactgttctcgacttccttcaagtcgtaataaatgtccccgtcgttttccaggaagttatccttcaacttgaccaaacccttttccaagaggtactggatcaaagacttgaaaataggagcctggacgtcaccaaactcacgaccggtttgagggttcttgtagttgaccttgaactttatctccttgccaatcaacaagtttctcaagtactccttggcagcaaaagagtcgttggctctgacgtaagagagagtcaagactctttctggagctggaaattgtgccgttttcgagggaacaagcaccacggtgtcaccgctcaacacattcttgactttggctacaaacaaggacatagcaattgtttatttaatgttatttttcaggctaatatcgtgtggaagaagaaatacacgaatttttcactttccagtttccgtcatcagatccacattaacgattgggaaaactggacaactggggaaagaggtcacgtgtgctagcgacgtgttctgaaagaaaaataaggttccccaacttgtgagcaattagcctcacctatcaaattctgaaatagtagcgaataaaaagcgtccaaatatgtttatatggttatatggatttatatggagagattctgatgagttgtaaaacattagcaatggtggaaaaaattttgaaattttgagattttgaaatttcgctaaatatctaaccaatatatgctccagtaggcgctctactcttgatttttcaccaacttacagccgtgattcgtcttaggatttggaaaatttctacatatatattccacttcattaaattcaatgacaaatttgtattccttccatatatatcttagctgtcaatttacaattaattcttggtatttgtttacttccgaaattgaagacctaagaaatggaaatattcttggattaattttgatttttcctatcgtttatagaattaaattaaataacgaaacagctatttaaatccaataaaacgctgtaaatagctttaagtaagtttaatccttgcaaaccatagcaatagcatggataataccaaaaagacccaaaaaaagcgtgcaaaatataacgttgatacagacctcgtttccgcagccgtactttaaaaatactgcaagtggtggaataaagatagctactattatcaatactcctttactaaccggctcatttggttttgaaaattgttggttcggattctggttgtattcatagtgttggcgtttaaattgctcttgattgtagttaccttgattccagctgtccgtgttttgattgtaatcgttattatagtgattgtattgattatgactatttgctccttgatgtttttcatttggaagttcaatacattcctgaatggctgtctccttgggtaactcactatagtagtgactttggcttttactgtcattcattatggatagacacactccaatgaaacgactgaaatgaaactagttttacaagtatttatataagtgcttcttgaggaattattctatcaacaaatagtaaggaaatacagcaatccttagagaatgtcatttacatatagttttaagcctccttaaaaacctccttagttactaaacctattgatgatgctgtgtctgttgaggaattgaaagtaaatgtagatttgagacgacaaaataaattggtagttaccaattatacaataccaaacccgtattaacggtaatttgttaaccatgcaatggggtggaaaatagagacaatattcgacaaattattagaatgtgcaatagaagatgattcccccgcaaggcaaaggaggctaatcttaatccaattttctgcatacttggtttcctttgccctaaagtaattcattgactgctacccagtttcatatataatccaagagtaacattccgtagccttctctaaaatctctgatatacagcaagatctcgtattttcttccgcatccatttaaacgacattgttgccattcaactaagaactgtacgattctaatcggatagaaattatttccaatggagatctcccgtcttcttcaataacttatgactagatctctaagttccgattcgtctctaatgagatcatctctggtttggggtcttcccggtacaataaatcctatgcagaacttgataaagaggagttgcaatttatatctgatagttccgagtgacgctattgccattccattgaatatacaaacattacttgctatcctttctgcatctagtaagaacacgattttcacatgttctaagcaatttcttgctgagcagcaaacctacgtctcatattgttgattggttgtacgagtgtaccctgtagaaagatctgaaaatgaattgagtgagaaaccaaggaattgacatctgagtttttttttttttttggcagcacttagacggagaagctgaacagttacaaagcaagaaattcgatctactatgctggtggctagatgtctaaagccagcagactgctatcggaaactgaaaattcaaataattcagaaacggtagcattttcgcaactgcagcccaactttcttcagaaccatacaggatctgaacgtgactgaatccgttaatatcggtgatcagaaagtgtgacaaagcaggagatattggtctcgagacttggcttgttgacaaataagtaaaactcgagctcttgaatccattcaaaagtgaaagtaaactccatattgacccggaaagtttttcaagttgttccataacttcattatcttcgtgcacttagttcccgtctttctgtactgaaggaactatataattcacttcacacattcctaaactagcttctgctaattagatttctttcagaacaccatatttggatcgaacttccattatttcaatataccttaataatcacttttcagtttgtctagttattgcatttgtccgttttcataatcacctacaatggctcctcgctctacagctcaaaagagacttttaaaagaataccaacagcttgccagagacgctcctccaggtatagtggctggtccggtttcggaggatgatctcttcaagtgggaatgtttgcttgaaggccccccggacactccttatgagaacggggtgtttccagctactctcagctttcccaaggattaccctttgagtccaccttctctcaaattcgatcctccattgttacatcccaacatttatgccgacggtacagtgtgtatctcgattttgcatccgtctggtgaagatcccaaccagtacgaacgtcctgaagaaagatggtcgcccgttcagagcattgaaaagattttgttgagtgtgatgtctatgttggccgagccaaacccggaaagtggggccaatatcgatgcctgtaagttatggagagacaacagggctgagtacaatagccagatcaagaaacatgtcagagaactgttgggattgtaggtatggtaatgaacatcaaagtaccttgtccccgaaaagcaattaattgacccagaagtgatactagagtaatgatagacgaacaatattgacagaatcactagaagtgatgtaattaagagcttgtaaagaagaaagaagacttcgtctacgtatgttcgatatatgtactatgtgcaatatatagtaatgtgaagaattcattatgtaaatacaaagaagcgtttcgtagtaccactatagtattcaaaactatggatactagaatggttgaagaagcagtagtcacatcgtcaaccgtatgacaattgaagaacaaaaatggtatgtcgtggtggttatagcatacagacttaagagaataaccaagagtgtactagaataatttcctaaaatacaaaggcatatatataagtcattaatggggtatagcatggggccgtttgaaataaaaattaagcctagaagacatacgaggataatgcgaatctttttcttttcacttttccaattgttttctcttcgaagatcgtacacttgctgtgatgtacaatcctaacgagagagtggttcaggttgctgtgatcggcgctggagttgctgggttgaaagctgcttcgacgttagttaacaagctaggagatgctcaggtagtagttcttgaagctcaggatcgtctaggaggtcgtattttgacagatacgacactgtcaaaacttggcttaaactacgacctcggggctgcttggtttcatgattcgttgactaatcccgtgttaaaggaagctcttgaagaagaagacaagtctgtatttgatttcgaaaaggatgcatattttgatgacaaagatactcaatttttcagctcggaccacgacggacccattgatgtcgccagcttgaaaatcaaccgagtcagcgaagacttggagaagttcattgaattgtactttgttgaatctctagaagtgcctgattcgtcgttggaagaagtcaactcaaagttcttcgaaaagtacggcaaatttttgacagatgagcaaaggcactattgtcgcaatattatcagacattacgaattatggtatggtatcacctgggatttgattagtggtaagcacgccatcatggatcataacggaagaaacttgttgaacaagaacggctataaattccttatcgagaaattgacaagtaatattccgctgcagtcggtttatactgaacaacaggttgtaagcatcgatagaaagaataaggttcacgacaagaaggttctcattcaaacaaagcaaggattgcgtatctattgtgactatatagtagtaactgttccacagagtgttctacagcttaaatctgcatctgaatacggcattacctggaatccaccattgccatccaatatcacttctgccttggagagtattcattttggggctctaggtaaggtgatattcgaatttgatgaggtatggtgggatccagaagaagatagatttgatattttggccgacattacacctgggttcgtcgcctcacaggaaattaaactgcctccagttccgttttcatatccagccttcgttgttaattttgcttccgttcacaaggagaaaaacctccctggtggatcattggtagttcttacccagtctccattgacacaatatctagaatcttctccagctctggaagcatggaaattctacaaacccatgcttgcaaaacttgcccttccaggaaagaatatcacggaacccatcaatatcatcaagactaactggacaaacaatccatatataagaggatcttatgctgcacttcatactgatgatgacccttcggagttgattatacagctttcaggagaatttgacggctgtggtttgattgataagaatatccgatttgcaggtgaacatactattctggatggtgctggttgtgttcatggcgcatatatgagcggtcttcgtgaagcagactggatcattaatgacttgagcgactcaatcagcaatatctagtcaatcagtctaagtattagaaatagctggtaattatatctcggaaagcagagagccagattctcaaggttagaaaatccgactgtgactgctgttcattctggtaacttcgaaatcgcctgccgcagtctactgagagcatcgatttcaccacttatcacatcttcccacgcgaatagaaatgtatagcagatatgtctttcaacacaatcagaacgtacaattatatcctcaactatgtttttttatttctagaaagtgtttcccatacttaattcttcttcgctttccaactcttccagcactctctagcatcttctagaaggcggctgcgaaaagaagcgcttggaatctcattattattttcctgcatcaaattttttgttcatctcaaatttgatataaattttgaagattggcttaactaaccaactttttcacaaagtagctgtgactaccacgaaaaggtcgtttctaaatctacaagtattcaaaaatgtcgtcccaattcgatgctgacaacgccgacaatttagaggaaattgaaaagcaattcgccgtcaaagctgtcaaccaggctgaaacatactggggtcttcttgaaaaaatcccaggctccaccttaaagttgactaaacacgatgacgatatcttcgagtcacttttgcaagacttcccagaattcaaggaacctgccaaagtggcggaaatcagggaactggaaatgaaatcgccagaaggtaagaaaagatggagagacttctgtgaaaagttcaacgaaattgaagactacaactttggtactttgttgagaaccaagtcaaatgagttttacacacaagaaggaaccatttttgctgtgagaatccagttttatgctattgaaatcgctagaaacagatatggtttgaatgactgggctgttctcaagaagtaaggtgagcaggtttgtactatagaatataaagaaggaatttaaataatgtcatgtagtgtgttcttgtgatgtcacggccctcaagttgtgaactccaacatatcattcctagattaatgaatctttgtaagaattaactatcttaacctggtagatatatctgattcatttgcgtcacatgacttttcacgtgccgccccataaatcacacgaaacatttaaacgatttgttgatcttcaagttaatagaaacgggcttctttcacttccttacgtgtttctccgtgtttgatgctcttgtaattccgatattgtccataatgagcaacggcagatccggtcctgttcccaagggcagcagccagaacgggtcacaatggctgacttcacagaattcaaatcaacaaacacaacaccaacagagccagcaaactcaaaaccaacagcaacaagtacagattaataccaatgcctacacattaccaggagtgatcaactacctcacttcagagttcacgaatctcgagagatacaaaataatgacaaacttggagaaactggagatgaagtacaagatagttcaacttcagggcgaattgaattcgcttcgcttcgtcaatggaaaacagaagactgtgattgaccagctcaaaaaagaaaacagtgatttaaaaaagaaattggatgaaaaattggcagtttctgctaggaaaggttctgaggaaattgaggaaaataaggaatcagactcaaaatcagttctgaaaggttcagagtcaaaatcgtctagtctgaatgcaacattgatttctgaatacgatgaatacgcagagatacctgaaatcgacttgctgataatcaagaagtctcgtcaacaacttacgaagtctatgaaagaaatagtccagcttctcaagactccatcagtgaaaagcgtcaactaccttgatttacctgatcctcacggaagcaatgttaacgaatttgatgtgttatttgaacatcaggaccacgaccatgatcttcttgatggagacaactctttcgtaaagtctcgtgatagaaaaaattataaagataactctgttgtagcactgttttttggcgatagagcagttaaagaactgatcaagattcatgacgatgacggagaagacgacgatgacgaaaaaggcgaaggaatagatgcgttttcccaattagaaaagagagcatcgcaattgcagaaacgaattgaagatgagaaccaaagtaaccaggctgaatcggctttttcagttcgattcctcgagccttcagacctcttgtcggcgcctaaagaaaccataatgccatcatcgcttactgatgaaagtgatactgagactgtagtgatcgacgagagcagagaagatgacgactacgaagaattggcagagccaaacgtttcaccagtaaagccggttaaacacacgaatatcagtctatcggaatctggtgagtccgatttgactcctccggcagaaggtggctataaaagttttagctacggcatctatagtacgaagattagaaagccagaaagcaattctagtccagagtacgaagtgacgatcactgattccgacgaacagcaaatattcgataagaaaatacagttgtcaatatctttcgataagatatcgctgttataccccatagtgatgaacggtgtagtcacttcgtttttgctagtagaagccgatggcagtatacaggctataacccttgatagtgatgaaccagaaaaactcctctacaatttgagaagttcaattcacgatgtacaaagtgatgcccttattgagttcactcccaagactaccgaaaccagcaaaagctatggactagctgtgagtggagttagtcaaacaggtcagtttgtgctgagagtgttccagatcacttacgataccagtgtcggttttgttagcaaggaaattgggaactataaccgatcattcttgaccaagagcaaggctaatgaagatgtagaattcgtaggttggattgcatccgaaacagaactcgcgtcgtcgaagctacctgtttctcccagaagtagagttaggcacagcgacaagaagggcttattctgcgacgacgtatcgttatccccctacaagctcttgtacaaagtgggcagcaaatggctagagttgaatattgttctgaagcagactatatttgttaagcagccacccaacataggtaattaagatattcgtgactaacgagccttttgagaggattatatatactgcttgttgctgattcatgaagacatgaaatttattcccatagtatctccacatatacatagtgcattcaatatacaaataggaatatgtgatattatttgatattgtagaagagagtacgtatttgcgaactctaagttaaacagagtgcgccgtatccgaactccgaaaatgaacctagtagctcagaccttgaatagagaaagctacaatctcattttcgtttattgattggtctcttctacggctctctatagcaaagatattagccaccaattacgaattttgtcagaaaatacctgctttgtgcaactcaatagggacaaaaatattatttttcggactttcagagaagaagcaccccgatatcataaggagtatctaataaactgagccatagtgctacccctgatgttcagaatgtagaggaccctttttgattgaagcagccgggttgaggctagattgctagaatgttgaccaaagaagattccactgattgttctgcaaagtttgaaatatttatgtcaaaagtggaacagtttagttaaatctgagaatgtgtagttgccacttactatctggctaattgctttgtctatactcggctatcgcttctgcaatatctaatgaagtctcgtatttttgttccatttgaaagatatcagggaattctgggttggaacatttggaaagttgtttgaccatgaaacaacttctgtaaaagattgcagatacgcaatggaacgtattggaagtgttttaattatccccttgagcaatttcactcttcgtcgtgaaaaatactggcagttggcaaatacgaaaggagttattcatgcagtagcagactaatgcacttggccgttttcgctacctttgttcgtttatcgtgcagccgaaactgcgattacgagttgaggatgacattaatcaactagacttcaagctgaaataatttgaaattgttccaataaattccttcttaagttgggaattcgatttgagcccctgttctcaaatcacagtaaatttttttaatggtagcatatatctacatttattttttaatatgatggctttttgtgaaaagtctgaagttacacaatcaaatgcaaaataaaactttttgggttggtagcaaacaatatggatgtaattattactggtaaaaaaataagatatgctaagaaagtctggtttatctgagtccgcatataatatacttgtacaatgggacacgatgtgtgcaacgaatcttttatctaatttaattactttcaaattaattcttgtgatatcgtcaagcgacccttagctatttagaagccgtgcaaaagaaaatagtaagatgaaaggttggtcttctatatctgtcataatagaaaaattttagcatatatattctcttgatcaatctcagattcaaaaaaccaggttaatattttgtctttgcttattttgagatgaacttgctgcttcaaagatttaactgtgcttgtaaacgtttcatccaagataggattctacttattaaagaaacaacaaaaatctttctcgagcaagctccaataatatttccaaaaaaatacttattattctgctgttgtgactatactactgattattttaagttgactctttttgctctctctatagcagtagcattttattattgttagaataaaacttttatgtattcaaaatctataataaacttatttgtaaacgttaagccaaaagaagaaaagcgattgccaacaaaggccaagaatgtgtcattttgtaagaactgttttctgcagcagaaatagattctgttgcaaaatttccactcattgaactgatgctttcagtcttgaccgttgttgtgaaggtagctattttggaagctaataattggttaacagggtcagcgctaacagtggtgactccagcagaataaatcctggaagcaccagaggaagttcctgggaaagaagaaaccccctctaaggaagtagagcagcttgctgaagaagttttggtggaaattgctgtatcagcaatagatgtagcatctgcttctaaagaagaagaagtaatttgataagtaacagtctctgcagcagcgatgaaagctcctggtgtgtgtggaactccagaagtagaatccaaagtgttaatatcacctaaagtggtagttacggtgggtaggttatctccagcaatagattggctttcgggagaattggaagtagaagtatcgaaattgacgctagcctcatcagacgaggtgggggttcctaaaccaacatcagtgtgagcttcattgccataaccagcaatggaactactgactgtgttggaggcagcagactgtaaagatgtgaatgttgctgtagcaattgtagtgccagaaactcctatagaaacatgtgtggtttcgaaaagtgacaccccatcgttgcttggagctggatagttagaaagagcttgagacacagcaacagaatgagctgcagtagatgaaatatcattatctggaactggagcatcagagctgccactggatccattaactgttttctcagagttggtgtgtacattagtgattgtaacagtactctgatcaatgacggaataatgtgaggaattaatggttgtttctgcagaagtagcagcttgatctgtaggagtcgaaccgtccgaagaggtacctggattctcaattgagaaagaatctaaggtagaactgctagtagtacctgtacttgaaatagagtttgcatcaaaagcgaaagaatcagacggagcaaaagaagctgggctatctgatgaaagtggagagtttccagtagcaacagactgaataaaagtagactcaatgatgagtgtagaagaaccagccagggaagaataatcaggagagagtgaagatttaatattcgaagcagaagttgcatgatgagaatcttcttcggaagaaactgaaaccgaatagatagaagaagtactattagaagaagaaaatgaagtagaagttttttcagaaacagagctagattctcctccaccgggtggtactgagaccaaagtaattggtaaacaggaaccttcgtctaaaacggtaatacgaagagcttcttcgccttggataattgggcagccatagaattcatgaatgtcgtcataactcaagtagttatcttcatcaacataccaaccgtcagtttcagcagaatcaagataaagacctctttctacatcaggagtttgaacatattccccgtttgatccactaagcacccgagtctcttcgttcaagtagaactgaatgtcagtacctcctaacttgactcccaaaatataaagtccttctctcttgttgaggttggctctgccggaatccatgtacaatgcttcaataaaggatcgtgtgccattgacattagcttgaattgtaagtctggttccttgtgtaggtgaaggaagtaacgatgaagttgtaagtgcagagctcgatatttcaggggaggaaatagttttcttagatgtaacagttgctgatgggctttcataaatcagagatatggaaacgaatgcttcagtggaagaagaagacacatcgccaatagtagaaacagatatggaagaaaggaaaacaggttcactggatgtttctgtttcagaagctgcttcagtgccagaaataataccgtcagaggaaatatctgaaaaagaagaaacaactctggaatatgtaacttcagcaactgaagttaccgcatcaggtggaactgtggaaatggcattcaaggatgtcaaagatgtggatgaaacaactgatgatgcaaattgagacgacgaagaagtaaaagcagctttagaagaatctttattagactcaactgaagtatctgaggtgtgagtagctccagaagaagcaatatccaaatccgaagaaacgaaagaagaaacagtaagtaaagaaaaggaactctcaaacgaagaagtgatttctgatgaagttgcagcgttcactgaagattcagttgtagtagaaatgacatccgaagaagagcgagaaaaggcaccttcagtgcttgcagcagctttagaaagggacacttcactcaagaaaatagatgatgaagcaacaatttctcctgatgatacgacaatattagaagattttgaaatttcagaagaagtactatgtgacgaaattgtgggcagttcaacagattttgagaaagaaccagcttttgatgaaggtaaggaagagattgcttcagagtcagaacctcgactataagaagcaacaaccgaggtaatatcaaatgatgaagcagtgtcaagtgaagataccggtcctggtgaagaaaacagttctgatgaatcagtaacaattaaagtaactgaaaaagaagaaacagcagatgaagattcaacagcagatgatgaagcagctgatgaagaagcaactgatgaagaagcaactgatgaagaagcaaatgatgatgaagcaactgatgaatcaaccgcagatgaagaagcaactgatgaagaatcaactgatgaagaattaacagcagatgatgaagcagctgatgaagaattaacagcagatgatgaagcagctgatgaagaagcaactgatgaagaatcaactgatgaagaatcaactgatgaagaataaactgataaagaggcaactgatgaagaagcaactgaagaattaacagcagatgatgaaacaactgatgaagaattaacagcagatgatgaagcaacagacgaagcaacagcagatgaagaagcaaatgatgaagaagcaaatgatgaagaagcaactgatgaagaattaacagcagatgatgaagcaacagacgaagcaaatgatgaagaagcaaatgatgaagaatcaactgatgaagaattaacagcagatgatgaaacagcagatgatgaagcaactgatgaaacaacagcagatgatgaagcaacagacgaagcaacagcagatgaagaagcaaatgatgaagaattaacagcagatgatgaagcaacagcagatgaagaagcaactgatgaagaatcaactgatgatgaagcaactgatgaagaatcaactgatgaagaataaactgataaagaggcaactgatgaagaagcaactgaagaattaacagcagatgatgaaacagcagatgatgaagcaactgatgaaacaacagcagatgatgaagcaacagacgaagcaacagcagatgaagaagcaaatgatgaagaattaacagcagatgatgaagcaacagcagatgaagaagcaactgatgaagaatcaactgatgatgaagcaactgatgaagaatcaactgatgaagaatcaactgatgaagaatcaactgatgaagaataaactgataaagaggcaactgatgaagaagcaactgaagaattaacagcagatgatgaaacagcagatgatgaagcaactgatgaaacaacagcagatgatgaagcaacagacgaagcaacagcagatgaagaagcaaatgatgaagaagcaactgatgaagaattaacagcagatgaagaatcaactgatgatgaagcaactgatgaagaatcaactgatgatgaagcaactgatgaagaatcaactgatgatgaagcaactgatgaagaatcaactgatgatgaagcaactgatgaagaatcaactgatgatgaagcaactgatgaagaatcaactgatgatgaagcaactgatgaagaatcaactgatgatgaagcaactgatgaagaatcagcagatgatgaagcaacagaagaagcaacagcagatgaatcagtaacaattaaagtaactgaaacagaagaaactgctgaccaagaaaagacaaccgatgcagatgtgaaatctgcagaaaacgaaacatctgaagagggatcaccagaaggaacattagaagcggatatcaaagaagtttcaagaaatgaaacagtatcttcagaagaactaaccgaagcaaaagaagtgaattcagaagacgaaactactcctggaaatgtatttgaggatataataggatcacttttagaagaagtgtctcctgctgaagaaatgaccactgatgaaattgtcgaactatttctaaaggaaaccgagttggattcaactttagaagtataaccatcagtgattgaagttgtaattggtgaaagcgaataggaagatgaggttgctgatgaagcttcagaaggttgagcttcggttgatgaaactttttcagaagaaacaacaggtgaaatgacagcagatgaagaatcaacagcagaagaagaagatgcaacatcagatgaaacttcaaatgaagaaggtgcgtcagactgagtctcagaagtgactatgatcacttcagaagaggatgtcacttcaaatgaagcgctagaaacagaagttggaagtgatccaaaatctgaagaagttgcggtagaagaaattataagagagccaagctcggaagacttcccttcggaaatagaggttccagcttctgatgaagagacggcctctgatgaaatgatctccgacgatggaaatttggaagtaccaactgcagaggaagaaaagtctgaagaggtggtcgaaacaacatttgttgagttcgagtgtgattcttcagatgaagatacgagctcagatgttgcgatttcagaagtagaagatgtgaaagaaacaacttctgtcaaagaaatcaccgcagaagacactttggatgaagaaacaggttcagaagaactagcagaattggaggattctgatgaagcagcagaatatgatatgtcagttgaagaatcataggacgtggatgcaatagactcgatgacggcaaaagacgaagttacaattgttctcgaacttgcttcagattgtatggtggaagagtcaaaggaagttgtgaaggaaattctttcagaggaggcaccattctgggaggaaatcacttcggaagaataagttccaaatgatgtcatggaaagtcgagaagaattcgacattgtagttgaagaaaagatatctgaagaggtttctattattggcgtatgagttgcagctccagatgaaacagagctattgggcaatggagcgtcaataggagaaactacatttgatggggaagcaacttcagtagagactgtatcagatgaagtaactccaatggaagaaactgaattttcataagatgagacttcagaagagacaacttccacaattgaagaatctggcttgcttgatagggtagaaaatttttctaaggaatttgaaaaagaaccagaataagaagtgatatctgacaacacagaatcagtagaaggtacaactgtagaagaatcaatttcgattgaagaagaaacaacagaagaagcacctgagaaggatgtggcttgagacacttcaattgatgatgagaaaggtttaactgaaggtgacgaagcagcagtagatgtggaagttttggaggaatccatttcagatgaagcaatttgagacgaatcagaaaaagaaacttcataagaggaagcaactgctgacgttgaagtctcaccagaagattggatatcagtgaccaaagtggtatcaaattgagaagatgatggtaaactaaaaatggacgaagaaactgaaggaactccatcgtcacattggggtgcccaacaattgtaagcagcattattggattcaacagggcatcccatactatagatgtactcctgacagttgttttgagtagcacaaatctgaacatcaattctgatttgtggggtacaatattgtccattaatactttgagcttgcaatgcatatgtgaagtcaaactcgaaaggtcctgtagaaggatcacctaagtagtttacaggattgttgactctgctaaacaagaagaactgaccgccaagataaccattcatggagtttatattatcaagtcgaaccatgttaatggacgaaaatggaacatcagtatccattgaaaaatgtaaagttgcttcatagaagtctccacttatccattttggatctctaaattctaaagtagcttgaggctggttctggttgccatataagtttggagtgcctgtacaaccaggaactatactgtcacaagcaacctgggctatagaaccaactggaagggttgtaaatgcaacttctttttggctactttcaccatcttgtccattttcgggtacagtagtaacaacgccttgggaagaggatgtagaagctgatttggtggtggtagtggtagtagttggaagtgtagaaaaagaagaagaagaagaagaagaagaagaagaagaaaactcttccccggcacattgaggatcccaacagtagtatggagcattgttcagttcaacaggacaatccatactgtaaatataatcttgacagctgttttgagaagaacaaatttgaacatcaactcttacttgaggagtacagtattgaccgtttctactttgtgcctgcattacatatgtgaatgcaaattcaaatggacctgtggaagggtttcccaatctgtttactggctgattgactctgctcaataagaaatattgacctccaagatatccgttagcagaatttatgttgtcaagacgaaccatgtttatggaagaaaatggtactgtagtatccatagtgaaatgtaatgtggcctcgtagaaatctccactaatccactttggattggaaaagaacaattcggcctcaggttggttttggttgccccaaatattaggagttccagtacatcctggagttactgctccgcaggttgcttgtacagaagagccagctggaagtgttgacactgaaacttcatttgaatttgctctctctcctaggttttgaactggtgtagcttcaaacccttgcaattcagaatccagtaatgcctgggctatcttcaaaagaaatattaagcataattgaatcacacaaacatacatctcgaatactactttttttgaagatatgcaaatagaaattagcccaacttcaaaactggaccaattcaccaggcacctccctactcttataaatttctcccgttgtagttgacatattagaacttccgtatgctcttgccaaaatctatgaaaattctagaaaatgcccaattctagaattttcaaattgcaaaaaatacttgcatgcaatgtctggtttatgcttctcactggttgcatgcatatttataaaatctaccatctatgtaggacgtggagagtgcattcgctgaaattggtttgctcttcgttctgcatctctcgttcagctactcaaactagatttatatctttcaaaagtagtggcttgttgcacacttgtagaattcggaagtcggctatctacggattttattgtcaacggctccccagctatactgtcttcagatttgctcttccataattaaaatatcctaatgtgagaccctactaccaacagttacccgttcactacgaccaaaaatattttaactaggtatcactaccttgtctgcttagttatttttcctgttttattctttttgctgtaattcttctggtatttcctatggaagaagagcattttactagcactcttagtgattgatataagaaaattgtgcttaaaatgtggttggattataaaatcctgcacagtaactttaaagtctaaatttatagtttactaaatatttcgcgtgtgatattaaaattgccaggtcaaccggcaattgactttttttttttggcgagaccgatacgaagataaactgcacctctcgtaaaagtactccagtagttgtggtggaaactatacagtatatgcccggagtggaacaggctgtgcctgcttgtttcactattaggtatgccttttggtaattattttctagggagttatattacaaatctagcacaacttctggaatcatctccgttcattgtctggctctccagttttgcactgtactatttcggtactgattccgttgttcgctagaactaactgttattttcaaaaatatttcttgttttcagcaggtgcctccaagctgtcctatctgacaacgagaatcctgattcttgtgttttatgcctggctggtcttttgctacaattttcgatgtattactacttttcaacctatggcatccacatggcgttccttcagtaggctaattgtcggtgtttagttggatgagaatttttatgcgcgtctataaaataatacgatgaggattgtttccaggacaattaccatcgttccatgcatataaaaatttgtcctcgatatttcgaaaggttaccaagcttatgggatgaaagcgaaaggactctcataactttaattgtcctcggctcgattcgaagtataccaaacttatcggccagccatctatgttctcaaatctagttttctaattaaaatgataaaagtactgactattgcatggatgtcaccatagatactattccactcattctagtaagacatacttcaagaaactaactattccattgtatataagtaccgaactgtaaacaacgtctattcttgtttctcgttcacgctattgaaaagagacttcatagtttaactatggacaaactgttgaaataagctgtatggcattgaacaatgattgtacactagtccattctctgcgtattgaggtgtgtttcatgttaattgaggtagtcagtgagacttagtcataagttttgtgaattttaggcatatgtaatctaagctataacattgcatcgccaattccatgttattatactacttcttaagatcatgctttaacatttttatttaatataaacaagtatatgaaagcttgatctctgtagttaggaattttccatattggaatacaacactaaggcatttcacaatttgttggtcactgtaatgtgctgtatttagtttacgatttgttataggtagagtctgacttgtaagtatatgatattgacttgaggatgaaaatcaagaagataatgagagacaaacagaacaaaaattaaagaattcacttcaagttgacagcttctaataaatttcactcaacaaattgatcgtatgaaagtctgtttcaggtactttgtattctgtagtgcaagtttgaattttgttatgtatacccgcggaattgtgtgttcaaggctgttcataaaagcttcaatatcctttctgcagtctatggttgacacaactaaagaagcaacaactaaaaaacgatctcgtactaaatagactaaaaagaatgtttttgaagtcttggaaaatattctgcctagaatgattctcggagcggaaccattagataattctttatgaagaaactcaaaatattaaagtaatattcataaattgttactgatacgaagaagtactcaactaaattagatctctttttgaccaatcaaattgctgaaaggtaaaataaaaaataaaagataaaaaaacataggggaaagaggacaaaaccgaacaatcaaatttttattggaagcgaagggacgaaaactcaaccgaaaatgaacggtgactccgtcatataatacaaaatggggctttgaaggtaattttccccatggatgaaatagactttgaacaatgcactaagttgctgcaatgtagatgcgaacgagcaatttataattttgataaaatagatttagatttagcagaccgttttatccttatgttatactacacaaagactataacctgaaacgtgtggctttctaacaaatttttaaccaaattttccaataacagagatcttgccccatctagaaattgaagtttcatacatagactaattgctattaattgttttcttatcaaattcagcaacctgttgataaaagaggtatctaccaccttcacctagcaattatagcaaccggagatttccaacagatagaatctgtagcaaaccaaaaagttcaattcctcaagaaagccttaaatcatttgcgaataaagaagtggcaaggagtgaatggcaataataatatatgttggttgtgcttgctctaggtcgtagttcttgggtatggccatgtccattaatgaactaacagtttttcaattcataaccatacgcaaaaataggaaaatgacataaattacgattgaaaacaattatcacataaacatctttcgcgtgccatagtgaaagaacttcgaagatgtactagtatctcggacttccattttctggaagaatttgctttcgcaactcttgcgcagataccagaaaacgcgtactctggcccttcttatctggatgtcgcacactcttgtcggcaaaacgtgtgggcaaaaaagcaaattaaatcacgtgaatctctccaatcgacttgtaaagacagcaaaatagaaaaaaaggcagagatgagaagaaaggagtagtttgattggttcaaaggagaattgggaagttatttaccttaacactttatcaaactagttagttaattatgttttctgagaatctaggactaacaaagcaaattctctatcttatcatctcttcgcatcgcttacgttaacgcttacgtaatgccgcctgaataatgaataaatcaagcagagtaccgaaataaaattttcagaattttgtaggaagatcttcttgtgtaaaaatccacgaatttccatcaaaaccaggtgaaactcgcagagattaagtggtcaggatgtcgcaatcgtttgatgacttcttgaaacagcagcagggccaaaaaggctctgctggccgtggtaattctagattcaccaataaccagtataatagccagcaccaaaataaccagtacccaaataatcagtaccagaataaccagtataataatcaatacaataaccagtacaatgctggaaatcagggttatgcttctaactacaaccaattgaaccaaggttttggcaacaatcagtacaaccgtggaggtttcagaggcaactaccaggccggtggatcttttccacagacccccaacgagtctttgcccaattctggaactgccacccctaagactcctaatgcaaacgcttcaagtacttcgttgaattctctttcgtctgccttaagtaagctcaatgtaggagacgttcccttccaggaaaacttggccaatcttgacaaggcagcaaagattgccgacgtcagaccagaagtggatgctatcactgagacatttgttgtcgaatctatatcctccgtcaatgagtacaagctcaacaatattgtcaagtctttggccaagcccaagaactcagcttttgtcagagaagcttcgcttttgattatccagcaattggctgtgaagcttgggggtcaaactcctaaggagtcgtacttggtccagtttttcctgaccgcatacgacttatttgctgataaagacaaaaatgttgtcaaagctgcaaagtctgccaccgacactttatacgggatctttcccgtagaagctcttggtacaattgtgcttgacgaatttttaaaatacttgtcgtcgtcggctaagtggaattcgaaggtcgccgctttggccacttttgatagattggtagaggaagttcctgctgatttattggaattgacatttgttagagccgttcctgtcttaacagacttggctacggatttcaaacctgaattagccaagcacggtttgtcctctttgaagaaatttgtcaaagtattagacaacttagatttgcagaacaagtacgatttgattgtagagaccttggctgatccctctaaggtcaccgagtgtatcaagaacttgtcttctgtcacgtttgtagctgaagtgacagaacctgctttgtcattgttggttccgattttggacaagtctttgaagatgtcatcctcttccaacgatcagttgaggcaaactgttactgttacagagaacttgaccagattggttaacaacaagagagaaatcgaaacgttcatccccatcttgttgcctggtgtagaaaaagtcgtcaacaatgcatctttgcctgaagtgagagacttgggtgccaaagccttgaaggtgttgaaggatgctgaaagtgagcagacagacggaaagttccatggcagaatcactttggaacaagcccaaaaattctatattgaaaacctcgactctgagtctgcagccattgtacatactttggacttttctgacgacatcatagctcaatacttgagcaaggtcttgcaagccgatgctcatgtcaatgattggaagcgtttgaaggaatacttagagttacttgtaaacacttctgaatccatttctgaagagcaaaagaatcaatatgtcgacaaggttattgaaaacttgagaaacttgtacgacgccgacactggcaagtccaacgaagacgacgatggtgccatagagatcgtcaacgccgacttctcgttggcatatgggtctcgtatgttgttgaacaagacaactttgcgtcttttgaagggtcaccgttatggtttatgtggaagaaacggtgctggtaagtcaactttgatgagagctatttccaagggacaattagaaggattcccatcagctgacgagttgcgaacttgttttgttgaacacaaattacagggctccgaagccgatatggacttagtgagcttcattgcttcggatcctgagttagctggtattgaaagaagccaaatctcagaagctttgatcaatgttggtttcactcaagaaagattggagcaacaagtcggttctctttctggtggttggaagatgaagttggagttggccagggcaatgttgatgaaggcagatgtgctcttattggatgaaccaaccaatcacttggatgttgctaatgtcaaatggttggaagattacttggtggaacacactgagattacgtccttaattgtttcgcatgactccggtttcttggatgctgtttgtactgacattatccactacgaaaacaagaaattggcttactacaagggtaacttgtctgagttcgtcaaggtcaagccagaaggaaagtcttattacactttatctgactctgtagtccagatgcacttcccaccacctggtattttaaccggggttaagtccaacactcgttctgtggcccgtatgtctaacgttactttctgctatcctggtgctgctaagcctcagatgaagaacgtttcctgttcgttgtcgttgtcgtctagagttggtatcattggtcctaatggtgctggtaagtccactttgatcaagttattgactggggagttggttcctaacgaaggtaaggttgagaagcatcctaacttgagaatcggatatattgcccagcacgctttgcaacacgtagaacagcacaaggaaaagactgccaatcagtacttgcaatggcgttaccgtttcggggacgatcgtgaagtcttgttgaaggactcgcgtaagatttctgaagaggaaaaggagcagatggctaaggaaatagatgtcgatgacggaaggggaccaagagccatcgaagctattgtaggtagacagaagttgaagaagtcgttccagtacgaagtcaagtggaagttctggttgcccaaatacaactcgtgggtacccagagaagttttgttggaacacggattcgacaagttgatccagaactttgacgatcacgaagcttctagggaaggtttgggttacagagagctcacaccatctgtgattagaaagcatttcgaagacgtcggtttggatggtgacattgctgaccacactcctatgggctcattgtctggaggtcaattggtgaaggttgtcattgctggggccatgtggaataacccccacttgttagtcttggatgaacctaccaattatttggacagagactccttgggaggtttggccatggctatcagagaatgggctggaggtgtggtgatgatttcacacaacaatgaattcgtcggagccttgtgtcctgaacagtggcacgtagcaaacggtgagtttatccagaagggcactgtagctgtagacaatgctcgtttcgaagatcagggaggagactctactggtacttctcctgccatctctagatcgtcaactcctagaccagatgatgatgattctcctgccaacatcaaggttaggcagagaaagaagaagatgacaagaaacgaaaagaagttgcaggctgaaagaagaagattgagatacattgaatggttgtcgtctccaaagggtactccaaagcctattgatactgatgacgaagatgagtagacagtttgtttactatgatagaatagcatagcagaatttattccttatttaatttgacaaagtcggataatagattattaatgttcagagagtgtagtgaaaagagaaggcaatatttgacgatggcgaatatagaatgattattgagtgatgactgcaaaataaaataatcaactatatagaattaagcaatgaacaaacaaaatatttcgatatagaaattggctatactagagtgcaattttgtccgaattcaaatgaataatcaactaagatgattgcaaaaatgtcgctgcctcagtgacttatactctcccacgacacgcgacattctttctccagtgtcgaaggcaaaaaaacgagattgagaattataggtaagtcgtttattccagaggcaacatacaattaaccgaatagcattgggatcttgcagttccaagtataacagtgcggtctatcgatataagcaaactatattgcgagaaattggcacgaaaaacggtattttaaccccaagttaattcagctaaatttctaaacatttcacttttgctttctcaaactcacatttgtttttcatttttcactaaatacttcatatcacataatggctgacagatactcgttttcgttgacgacgttttcgcctagcgggaagttggtccagatcgagtatgctcttaacgcagtcaaacagggtgtgaccaccatcgggatcaagtccgccaacggtgttgttcttgccacagagagaaaggctaattctccactcataaagagcgataccaacgtcaaagtcgaattgatcaccccagacatcggcatgacatactccggaatgggacctgacttccgagtacttgtagatagagcacggaagttggcacacactaattacaagcggatttacaacgaatatcctcctgtaagaatattggttcaggagatcgccaaagttatgcaagaatccactcagtctggaggtataagaccatttggtgtatcgcttcttgttggaggctatgaccaacactctgaacagttccagttgtaccaggttgatccctcaggttcttatttcccctggaaggctactgccattggtaagacttccaactctgcgaaaacattcttggaaaagagatggaacgaagacttggagttggaagatgccattcacgtggcattgctcgcattaaaagagtctgtagatggtgagttgacaggtgagaacttggacatcgccattatcagtgatgctcaggaacacttgttgggattcaaaggtacaagtttagagggaccacggtacaagaagcttactgctgaagagatcaatgacagattagaagcattgtagagtaaaattagtaatgtaaagaataaaaaaatagtagaaaagaatagaaaatagtgtagatggagggggagtagggtgctaaactaggtctctcgagtttatactacctatattgtcacgtgctgcatcacgttctcagtatctcaaaattattttttgcgtacagtttttttttcagaaggcatctctaatttgcacctatttccacttattaaaccaatagaaacatcattagagaacacagcaaaagatggccgtcaaaaagaagtcgaccaaaaagcgtagttccaagaaaatcttggacgctttccagatagcagaacgagctgaaaatggctccgacagcgacaactacaactctggaagcgacgatgatctcacagtacaagacggagttctagatgcttcgaaattcttcaaggagctgagaagacccgacggcaagttcgacgatgaagaaattgactctgatgaagctttgggctcggacgatgactacgacattttgaactcgaagttttcgcagactataagagacaaagcaaaaaagagaaagacgaaggagaagaagagaagaagaggagaacaagttagcagtgatgaaagtgaggaagaagaagatgaagatgaagctgggtatgccagtattgacgaatcacagttggtttcgttgtccgaagcttgggatatggacgatgctgatttggaaaaacatagtaagtctaagtctaagtcaaagtctgattccaataagaatgaattggtttttgatgaagatgcctgggagactgaatcatcacaagagtctgattctgatgaagaagacgaggaagatgaaggtgaagatttagaagtggaatctgaagaggatatcttcagaaatgagtctggagaagaagaagacgacgaacttgatttatcacacactgtttcacacttaaaatctcagatgaagaagccagaaatacaaaaaaaacgattattgactgaaaccagagaagagaacgaatttgttttgcctacagggggtaacaagttatctttgagtgagatgatggcagctgtagattccagtgtttccaatgaagcatttttaattgacaaggatgctgaaaaatccaaagctttggccactccattgcccaagagaatacaggagagacacgagaggaaagctgcttacgaaatcacaaaagaagaggttagtaaatgggaggatgcggtgcagtctaacaggcaagcagaagtgttgaaattccccttgaatgccactgttacacataacgatactgcaagtacattcaaaacatccactgagcccactactgagttggaaaagcgtattcatgatgttttgacagaatcatcattgttggacgacaagaaggaagccactttcgaagagatagctgttgccaaaatgtctgctgaagagatgaaaaaaagaaccaatgagttacgtttgatgagagaattgatgttcagagatgaaaagagagctaaaagaataaagaagatcaaatccaagcagtaccacaagatccagaagaaggaaagattgagaaatcaggaattagtggaaggttctgatgctgagagcgatggtgaggaccacgacttgaagagagcaagagagagaatgactttaaaacacaaaacacagtcaagttgggccaagtcaatgatcaaatctggattatccaaagattctaataacagagctgagttggaagaaatgttgagacagggcgaaaagttacgggccaaacaattgggctatgaagatggagatcagagtgacgaaggagtctcagatatcgaaagggattattccaacgacgacgagaatgctgacgaaagtatcaagaagctcggaaagggtgttttgggaatggacttcatgagaaatgccgaagaaagaagtaggcagtccaacttaaaggagttggaagaattaagaagattggaaaatgaaaaggatttagattcattcgaagattcgaacagtgctctaagctctagcaagaaccaaggaagaagagtctatgctccatcggctgcaagtgccaatgccgagctaaacactgtaaaccagattaccattgctgaaattactgaagaagaatctggcaatttgacgaataaactcagcaagaagttcgatgtcgtggattcgactaagcaaaagcaaaagtctaaagaaatcaaagaacaagatgtaaacgaaaatgaagaagaagaattaaatccttggttggttacttcggcaaatgaaacttctcagaagtcacagaaaattactgttgtagacaaatcgtcttcgaagttggctaaggctgctgctaagattgccaaatccaaaaagagaaagcaaggcaaaaattatgaagacgaggatgtgattgatatgggcgaatcgatgaagattgtggatcatcatccaggcagtgagtctgaagatgaagacgttaacgaggttagaatgttcaaacaaaaggatttgatcaaacaggcctttgctggtgatgacgtggttcaagaatttgaaatagaaaagaaaagagtcgtcagagaagaagatgataaggaagaagatatgaccttacccggttggggtgactgggctggaggtaacaaaaagtccaagaagagaaaagttgttcgtaaggttgacggtgttgttcaaaaggacaagagaaaggataagaatttgaaaaacgtgatcatcaacgaaaaggtcaacaagaagaacttgaagtaccagtcgtctgctgtcccattcccatttgagtccagagaacaatacgaaagatcgttgagaatgccacttggacaagaatggacttccagagaaacccatcaaagaatgacgatgcctagaattatcaccaagcaaggtacagttatcgatccattgaaagccccatttaagtagcattttgtattaatagcattccggtagcattccgataataattagcatggtatattatcgtaaattaacgtatattgatatctattccttgttttctataccagtaaaatctattttagtctaaaagtataccatttctaatggcccagctcttgccactgaggaatacaccgctagggtcggtctcccttctgacttggttgtactttaccaagttttccccgaaccagtccttcatcacagggttgaaaccaatcatcgtgtagaatggctttccaccaaagtctagctgtgtcttcaagtcttgttcggtcttttggtcgccatcgataccaatgaagttcttagcccaatgaggctttccgcctgcatctcccatgatgttttcaaagatttggaaccattggtgagtttcgacattggtaccgaagggtctgtacatggtagcgttgacgaacatggtcaactggtcgtttgtcacagtggctccttcgccagcaaaaggaatatatggagagttgtcgaggaatggacgaaagttgttaccaggaattgggcccgcactcaacctgtctctcttggccaaccaagactttggaggatacaaagacggctcgaaagtttcttcatcaatgaacggagagtttgagttggtcacgttggagcatctaacttcaataggagcatgaacaaagaaatcgcctttttcagcggcttccaagatttcctttcttaatttgagaagaacatcctggcccttaacaagtggtgcagaccattcgttgacgaattgactgaacaagcaatccatgttcaaaccatctacagagtgttggacagcaatatcacctttacccaaagtttccactttaccgtactgctgctcaaagacaaatttctctacgaatggtgtcaaacgtggcaagatatgaactgatacccagagcaatgactcgtagaagaatcggccaaatctcgttccgtaccatgagggccttggatccgaaagaggatcatctgacttggaagctctccagcagacacagttgcccgaataagggaaccaccagatacgtataaactctgaatcgagccaaatattctcccagttgctcaaaagcgtgtcaaaacggatgatttcctgtttggacttgatggtgtaagaaggacaagttctcaaagtcacatgagtgataatgccaatcttacctaatgacaagagtgcagcacggaagtagtctgggttttccaccgagttacaagtgatcaaattggcttctgcgttcaagaacgagatcgagacaacctgttgagaaaccaaaccgtggtattgcgtagagccatgagttccggtagaaatcaacccagcaatggattgatctgatatggaacccaagttctgaatagccaacttgtgcttcttgaggtagtcattcaactcgaaaattctacatccagcctctactgtcaagtcgacaaacttgacttccttctcggcagggttggaagtagactggccatagaattcttcctgcttaataacagagttgaacttatccaagttacataaccactcggtagtcatggtcaagtcactgggcgaatggcccgacccaactgtcataatcgttttgccattctgacgagcctggttgatcaattccttgatttcatccaagtttctaggctggaaaatagcctgaggtttgcagaagaaagtaccggcccacgttttgtggacgagtttgttggtgacaaacggctgaagtgactctggaatagacattcttataaatgtagacttcagagaaaaagaaaaaatcagaaagaagaactcgacaaatgcaacaagcttctacttaaaattaagtccaaatttgtaatactcggctttttttgcgaagcgagagctgatgtaaattctgaccggaaacgataggccgacggaattggtggtatttttcaaactgtgctagtagaagaaactacaatggtgattctaacgcttctcgcaagttataatttacggattactttatatacttcgagtctacgaagtccggctgttcagctgtgattctccaaactcatcaagttagctgactacaagtgatagcacgattaggagctacgcaggaatggtgatactgtggcggttggatttgcaacagagaatcttataatgacaggacggaaaaaaatgaaagcttcaagatgctattggttgatttcgcagccaaccacgaataaatctaaagtgcaagttgacatagaactgttgcaaacctccaaaatgggctacgtcttcggaaggaagggtatgggtcatgtgattctgtctctaacgttgtcctactttcgcagcaatttccatccatagttaaaaatcctagtattgaaatctgtcaaacgcataaaaaatctacgaatacacaaaaaaatatggacaaatactttaaactaaataaaaactaaagaatcaacggtagagttcattcttaccatatttgcctcttttttacaattactggttaggtgctcgggatacaaccagtatcatggatactgatatttgtaattcccaagctagaataagattgcttcggtctcctcttttctattctaaatttcttgtttccctttgatttttttgtcggtgagtaagctgtatcacgtaaatggttccaacagtgacagattgaatactcctcgccgtatctctccttatataagctgtcagttcgatcaaaatattcatcaagttttgttagttctatcttttcatcatggtcaattacgcatcctttttcacaattgaggcaatcactgaaataataatgcattgaaagttgatgtgtatgccaaataagatcaatatccaatgtaggtattagctgaaactggtctccgtattttgatagtaattcgaaaaatctacagtagcggactgtcgactctgttaaacctatttcaatatgaggtgaatggagccaattgatttcgttcatttttgaagtaaatttgtattgtctttcaacgcggtcaactagatcttcccaaatggacaatcggccatggactgataaatcaatcaaattcatattctgataaagttcaagtaaagtcctcattctatctccataactgatattttttgaagtatagtcgataatatcttcgagggaacgcgagcgaacaccttctaatcccaattctctaaattctgaatttatatattcttttagtttgcttgtatctccttgtctgaggtacttgtctgagataacagttgagaaaaatttaaacaacccaggaagtggtttattattggtcatgtcagaatataattgtcgtttccttaattcttcatgagaaattaattcattgaatttgcatttgcatttcgtatagtttatcttctgactaaatttcttatcagaaaatccagttgaagcttcattggtgtaagggacatctgttaaaattgtttcctcacagcaaggacatgtaatagacaatgactgttcaaacatagagatattgtcgttatcgtatgccaaatcctcagaatcagatgtgaaactacgaataatttctaaatatctgtctttgagatttttgcttggacaatactcaaaggttgcattttcaatggattcacttattttctttaatggtaaagggaacatcccaaaggacaatatatcatttctgacgcagttatcgtagaagcttcttggacttaataagaatgaatgccaaaccataatcacatctaatggtggcaataattgatccaataatgtagttgtctgtgaattcccagaggtatagaaaattgtattctcatcaacatggttgttgacatcagaattaagatacttttttaaagatgagataaaaattataaatctccttactgcgtttgtaacataaactttccaaattttaatatgatcagaatctggattttcctccataacttgtcttttcaatttgcctaatgctttgagtaattttaaatgagcaattgtgtctggtagagtgggaatatgatcggggcagttagcgtccgtctcattttcattacagatggatggaatagtttctaggtcgtgtgtgtatttgtagcatgcataatctatgggtttcagtttcttaagaatggtaataaaatcgtagagttcaacgtccttttctttatcagtcgaggttttcattttaaagaaattgagttccaaaaaaaatgtatcacaatattggtcaattttacttcattatattgtattgatatattgttattctgtcatgctcctggtttttgcagctcctcaatgtattttgggggtatttcccaaataggtagtggatcctgacggttgactttgaaactcctagatgttccgaaagtccccccaaagacccgtacaaacaggatatccgtctggttatgacattatccttaaaccttagccgaaccaggaacggagagtactctcttgtgttattgagatccttatctcttgttaaggaagattgaaaaggctctggcttttcatcctcgtaaataaccatagacattgatgagtgagcatgaatcctttcaaggtcttctcaattgaaaagtgatgctgtggatccattgcaggtaattaattgtcggaagaatggaagtgatatcaatttttccttttagagagattcaggatgaatttcaaaaactatgaccccatcgaagctcgaccccctaaagttgaccaattgtgacaattattaaaacttggttaataatattaaacagaattgttttgctcttttagtgaataagaaatttctgctgatatatgctgctgcaatcgcaggatcggaaccagctaccactgtcgaaccaagtaaatagtgcttgtatcaatatacgggttttgcgaaatccaaggacacaaatttgtcaatacaatcacagtttctgcatttcaggatggcattcttagtggagttttctaagcttaactaataagctggtgggatatatctgagaggtatatagtcggagttgtcgttttgtgataatttgtttcttaatgtgacatgaatattgcatcggcatttatgtagcagacggataaactatcgggattcgaaaatgacatttttacgctattgctgaacaaaatcctggcaaaatccgaatatttgggtttaaaaatgcaagtgctaccaaattaaatttgatctaaattccgggatgatttttaaattcttaggaggtgttagatatgaagaaaaagcaaagtggagtatttctagaaggcagtacaatcttcaataatggtaacttgtagcgacaatacaggtaccctcatgttgctagaaaattttcgttgcaagctgtcaaatggagtgggtcttctaacttggcacagcaattatgaactttctggttggatagattatcataagcgagatagagttgatcgtaagattactggagaatgtagcctgtggagagtaatttctctgcacctaagaattttagaacaatggaatctacaattgaatatgaaaatatatgaaggctatgagctgactttgcttaagaccagaaggttacatatgattaagcaggttcatattatctgcaataaaagtagcatattatagcccaaagccagcccgaaaatgagttgtgaagtatacacttactttaatttgcatgcactttgaaacagggtagaatcacaacaatctctcgctgaacgtaagccatctataccatatttcatatataccatatatcacttgtgactacacattcatatctgtcttcatcatccttcgacccacagccattcttacaagcccggcaattcaagaaattcacgtgactgacgcgatctctcgcaccgagcaaagtattcgtcgtttagccgtatgggctcgtttaaaaatttttcagattttcacttatcaagtacagtcgtataagacacatcggatttcaaattctacactcttttcttcagtggcgattttggttgtctttttgcttcttttgcttcactttctttaacaattcacatgtctccacagaatatcggtattaaggccattgaggtctacattccaacccaggctgtcagccagtctgagttggagaagttcgacggcattcctgctggcaaatacaccattggcttgggccagaccaacatggccttcgtcaacgacagagaagacatctattcgctctcacttacagtcttgtccaagttgatttctaactataagatcgacaccaacaacatcggtcgtttggaagtaggcactgagacacttttggacaagtccaagtctgtcaagtctgtgttgatgcaattatttccaggcaacaacgacatcgaaggtatcgacactgttaatgcatgttatggtggtaccgctgctgtgatcaatgccctcaactggatcgaatcatcctcgtgggatggtagagacgctatcgtcgtcgctggtgacattgctatctacgataagggtgctgccagacccactggtggtgttggttccgtggctcttttgattggtccagatgctccaattgtgtttgaatctactcgtggttcatacatggaacacgcctacgacttctataagcctgacttcacttctgaatatcccgttgttgatggccacttctctttggcttgttatgtcaaggctcttgaccaatgttatcgtgcctactccaagaaggtcaccaaggatgccaccaagaccgttggactctacaaccacttcgattacaatgctttccacgttcctacctgcaagttggtgtccaagtcgtacgccagattgttgtacaacgactacatagcagacccaaccaaatttgctgagactatcgatgaagctaccagaactgctctcgacagtttgacctacgagcagtcattggtcgacaagaacttggaaaaggtatttgtaggcttgactaagcaagaagctaaatccagattggaacctgctctcacggtacctaccaacaccggtaacatgtacacggcctctgcctgggcctcgttgtcctcgttgctttacttcgttggctctgagaaattgcagggcaagagagtcggaatcttctcctacggttccggtttggcctcttcgttgttgtctgttgtggtcaagggagatatctctgccatcactactaacttgaactttgactacaagttgggcgaaggaagaaagattgaatccccagaacagtacatcgctgccattgccttgagagaaaaggctcacttgcaaaagtccttcaaacctactggttccatcgacaacttggccaagggtacctactacttggttgaagttgacgacaagttcagaagaagttacgatgttaagaactagatcttctgaaccgtttcatagtactcatcatggcatctgttaaatcttgtactatatatttgctagcatatcgttccatcgtctcgctattcttttacttcgatatattctacttgtccttagctatttaataatagaacaactcagaaaattatgtagttcatataggcgcatttggctgcgaaaaactttatcacgagagtataattttagtggttgcaattaaatgggttgtcgacggcggtatttactcttctgtttggatataaaacaactacagtgtataagatttccacctagagagacatcttgtgcaagtgctagttattgtgtttttgtattgaggcacaatctttacatatccagtgttttttgcattcagacttgaacataagctacgaagaacacaatttgaagagctatcctaaaaagctatctatttcactctctctacttccacttatatatatgctcagaaacacttagccccagtggcatgctttatccattgagtaaaatatcttgaattggcttatagagatattcatatctagtagtctcactacctatacctatttttttgtagtcatgtgatctgggaagagatgcaaaaaatttgtagattttcaactttaataggaagtgacttccatagttttcaccttgaggattcgtcaattatgtcttcctctctctccctaatagcacagtacttggctactgaaaagagagtggagattgctgaaaaattgtcagcagacatttctagcaaccccgaagccatcgatgccctctgccaaatcctagatgttctagacttggaggagagtctgacagtatttgccaatattcttgactactccacaaagattatatattcagcaacttcagaagaagaagacgaagaatctgttgactatgctaatgttttgaagtttgctgcaaaattacccaaattgcgccagcagttgctctccaagatcctatccagcttgaagacatacatccatgagaaccataactttattcccgaattcgacctgattgtagaagtccaaaatagtctggcttctgattataccgaaccaatcgaaatttctaatgatttagttttgtctcttttcagtttcttgcattctttcttcgtcgcaattcctgatataggagacctagaccaaagcatagactcagttctcctcaagcttttgagtatcaatgatgagaaaatctcgtctataatctcgaagttgttacgatggagaatctcatacatcgctgaaaaaattgacaactcggatatgctctggaagatcatttttgctttggaaagctctggaaagaagtaccacaagagccacgctttcatcttgtggttgcggtatcttgatagcggccttgcccattatgaagtctaccaaaacatcgtgaaaacggaacgatactggaaagtcttgcaaagtggattaatcagcgactctcatgaatttagaaaattctgtttgtctatcctccagctttctgtcaagctgatcaattgctcgtttgagaatagtataatgtcctgggattccaccaaaagttcattgtatttaagcgaatgggccaggtattgtaccttgtttgaaataatggctattgatacatccttgcaccaggcagaagccggtcgcagagatattacagggctaatctctcctcaatcatttattcacccctcgtggggtttctgtttactttctactggattcaaggctagcatggactcagttcgaaagttttctcttgatcttttgttgtcgattccagatgagcatcttcatcttatcaagtatggtttgaagttcttagaagaagtctacttgccctatgccatgttagctcctcattatgctgtaagacctgaagatggtgtcaacaagtgtatcttcggagaaatcatgaccaaatttattgccaacttactagttaacctcacgtccgaaaaggagtatcaagatgtagcattgtcgattttgaacgtattagaaaacctcaaggaaactttcgatccttcgagaatctacattgctcatggattactcttgggtttgtctaataagatggttttgcgattcgatattcataggagcgtcttgctcaagatctttgaagtaaatgctgaaggtgacttattcgaaaaggttattcagaccatcaacttcagaatcttattgcactttaagattacacaaaatacattattatcattctttgaattattaaacttgttcatcagattcaatggtaaccaaattgtcaatgagaattttaccttgattcaggaatacctccagacaaatgaaattgatagtcagtcattgttcagcctccttaaagatgaaaatgtcactggtgatcttaaggctttgattataaaggttctaaacagcagtcaagaccagcttttatgttatttgagcaactgttcaggagaaacgattgcccaagtgattcaatcttcttctgaactctccattttgtctagtccacagttggttgaattattcaacaaaatcataacccagaaaccatcttctgttatttattcttcattggcaactgttgattttgaaaatcttcaagctcttatcccttcaaaatcttacatttctgacctctggaagtcgattatttcagaaagtcaatcagacgaattacctgtcttagagttgatgttacaaaagcataagttcttcaataatatctatgcgcattctacttcagttgttatggatttcgtcggtttggttgagttagaaaccaagattctttctaaatcatcaaaacttgttaagtccgttaaagaattttacaagttgaaggaggaaatatatggtgaatattataagaccctcgaaatcactagtaccaagagcaagggttattcgattgaagacatattgaaagtgttgaattccgattcttctaatcatagagccaatttttccatggttcaacttttaaacaacttcctctctactaacaatgatactcagattgcttcattaaaaaaagttgttaaattccttacggacttgtggaagtctttagattcctctcgattacaattaaatcaaaaggacttgcatgttttgatgatcgatactatcttgcacccttcgttgctatctctttcagtagatgatgatgaaacttcacaaaatttgtttgaatttgccatttctgttcttgaaaatgctcaaggtagaagaagtttacttccagcgttagctaagaatctttctacttaccaagtcgaacaacatgagaaatttgaagctctaccatgggtagttgaaattttggtacgagcattcattgtgtatcaaataaggaataatgtttttaagttagagaacatcattggtgacatttacgacagaaggatctctttgacaagtggctgtgatctttactcatcagtttatggacctgaagaagtgagtgcaaaaatatatttaatggccatcttcaactctgtaaagacatccacatttgctaaccaaatagtgaacttcattttcgaaaatgaaagagaattctatttcttgcaagtaaataagtctaccgacgggtttgaagaatggagaagaattcaattatttacaatcattgtctctgttcttgatattgctggtttcgaagataaattggatactttaatggaacttgtgggcactgatccaagtcctttggtaagagttttcattgaatggatcctttcatttaacttattgaagagcaagaaatatgttcagcagattcttgaagacttgctgaacgaaaatgccaatctcaagcctactgttattacttcctatgaaagaatcattttccttatgatactgcagttgagtccagaacaggaggtacaagtattgcaaaactttttggccgttatcatccctggagctacatcaaataaggctgtcacaagacatttctcgttgtctttggtagtttctatctacgaagaaattgaaagcaagaagttgaaaattgattctcatttgaaggagatagtttttaacatgtacaagagtgcttctagttctgaatcatatggccaattcagaagtggggatgctctcttgtgggatattaaacaagatttgtctttggtgagcatatctgggggtgtattaatgagagtttctgacagagatattttcgactatatctccagacaatcatacttgaaatacttgacacctcaacagagccagtttttgaaccatgctattggcctcgagcacaaggatttgtggattagagataagcttattcaaaagaggtcagtagccaagactggtaccacttcacagtcacctcttcaaaccaagagtggtgcctggaacactgtcatggatgtggatgaaactaccagaggtaaggaggttgtgagaagtgacttaattgtcgtttcttctttggttgataaacctcccaacttgggtggtatctgcagattgtgtgatgttttgggtgctgggttattgacgttgaacgatatcaaggtcaagagccacccacagttcaaaaacgttgccgtcacggcagactattggatgcctatgattgaggtgaagcctgaagacatcaaaatgtatcttagagaaaagaagagggagggctacactttgattggtctagaacaaaccgacaagtctgttgagttgaacaacgagttgcagttccctaagaagtcgttgattcttttgggtagagaaaaggagggtgttcctggtgatttgttggcagagcttgacttctgtgtggagatcaaacaggttggtgtgatcagatcgatgaacattcaaactgcgactgccatcattgtccacgcctactctacacaacattgttgaggtggcaacaataatttcaatatgactttatttatagggtctaatgtacaatatacgtataaatatacatagtaatgcaactccattttgtaactatactagtcaaatcatcctaggatgtcacttagagaatctagaagatggtcccctcttcatcgtcttgttctatcaatgtgttcaaggccgatattatggcaggacagtacttgttgcccaaagcgatacctttggttatcaatgtcctattcaagcccttgaagttcgagttgttggagtttgtggcgagattgatgttcgagattggtgttattacgttattattgtagaaactgattatcaatccattttccaacacttgttcttcttctgtggaagggtctataattaagttgggcccgatgacaccaagagtgataaaaattggaggttcaaaggtttccccttcttttaagtagtcgtctatgtattttgcgttatcccagtcgtctgagaaagttggttgttcagctatttcctcgtcgtttacatcactaaccaataatggtaatctggtagttttcaaagccaagtacgatgtcaacgagatcaaactcaagggatatgacgagtggctgacaactatacaatccaaaaagagcttgaatgcataacgagatgtcaatttgaggtacctaacaggaaaattgtgtagcaataagttggttagatagaacttcaagttcagaacaaagttggaatcgtctctgaagccagcaatatcgatgtcacattcgataagtgatgattcctggctcgccaatacgactttggccttcacactgatgatacactcgcttccgtccatcaaccgtattcttgctgatccattggagcctggaagaaaagctgttttagcttctagaggtctgaactgatggtctgaacgcgagtctggcctgattgggggcgactgggccaacgagtcgtagagatatgatctctcagcaggtgagaggatcatttctgcgtatttctgtgttatctgagtccaaaaagggaattaatgtgagaatattcagtgaccgtagaggaatcgagatgggtctcgatttttcagctcttctcatcttcgcactcctagggtaaatagctgagaattagtgcgaatacttaagaggacttagtaagagaagacttaagaaacggtactattcaaagtgagtaggaatacagcaatagataaactttaggctgaaatgagaaaggttactaacacgttgataacggctgatactatgctattggtaagttaattgagctcatttctctaccccaacctcttcttttcgcatccacactttactctcccatacttagtttcactgaatttttatgccggaccccaaagaaaaacatttaattatcaacatcatcatctctttcatatccacttccacagcatccatagaagttcacaaacactgagagctcggttttctcttgacaatcataactggaacattctcattatcggcaatcaagtcacaaatcaacacaaaccgatcttgcaaacacctcaatattcaaattcatatagctccataaatgtcatcacttttctcccagactaacgccaatgggacagttgctaccccacagcccacctggttccagaaccacaagaaacgagtcattcccaaccatttggttcctaaaaagaagcctgggttccaaattgcagcttcggcgacttcgaaaagtaaaaaggattcagaactgggaaaatcatcatcgtctggatcatcttcttcggcccttttctcgtcatctaacgaccagttcaatatactttctttcggcagccaactgaggaagtctggtaccgtatctctggccaatggtatcgtcgatagaagaagtagcgtgggtactctcttcgacactacggccaatgaactcactcgttatgatgaaacctttaacgaaactgtagttgatgatctatacaataccagtcttagctatggcgaagatatgcctcctacaagatccatccacgacttgaacaatgaaatcttgatatcattgaataaaccagttcaacaaattgactcgttcatcaataaagaccctaaaaatttcaacaatgtcttcaatcgtgatggcgctaccaatgaagatatagctgacggtgccatcagaaaagtttcagtcgaagaaagacgagcttccatcaaccctatggtccatagtgagtcagctatcttggtttttggctaccctgagtcgttgtctaaccaagtaattcagcatttcaaggagtttggtgatatcttggaaaagttcgaagtcaatcagaaagtcaattccttacttaacaacagtagccaagtcaagggcaagattgtgcccatattcagtggcaataactgggtaaagatcacgtttgacaaccctgcttctgccgttgatgccttacaagaaaatggagtagtgttcaatggagttcttttgggtgtcattccttatagcaaaaacgcaattgaaaagctccaaaaacgtaaattaactgatagcgaagatattggaggaggtaacattgacttgtctactctaaatgtcaacttgaacgaagagaaagacgacaccaagaagtctaatactgctgcacctaatgctcaagcaaaccctactacctatactactagattagacgttaaggatggctcgcagttctttttgaaggcggacggtgaccaacttaaaaacaataacaacaacaaggccaaagacgaaaagttggggctcttgggtagtgtcaccaggtatatctttggattccatgaattgtgacttcgctttttatgagaggtgctgattagtatttatttgttagccacttccaattgccttactacatatcaataacttgataatatcaattatcttgtgaactatcatttgttgttcgttgtgaattgtaaaattaattgcattgtactatagaagttttatttagattcataataaacaaaagttcgatactacttaaagatttatttccatttaggcttgggtgactcggagggtggatgccttttgggagacggcgaccggaaaggttgatattggtcagtaaatccttgtctagtaggcgacggagatctgaacggagacttgttaagattgttattattgatgcttttgttgaaaggcaatggttcaaatcctaggaactgtttcgcaggagaaggtctactaggtgacctgttatttatgcttggtcgtctattcaagcttggtgatctcacgggactgggtgatctctggagtgaaggagtatgtcctccagatctgatgggacttggagacctgttgaaaaacgatggtgactgcaacctgggtgtatacgatatggaagagtttctctctagctttgggatactgaatctactactttctacattatgatgtctagatgtaaagggagtagaagatgtataccaatcacgatcgtgttcatcttcaccaacatcattgtcgtgcagcctgacaaatgaataatgttgatcttcacccattgcggataatcttctgttaaactggttgttgcgagccatcaagttttcattatcatgacggagacgtgcaagtatttctgttgaatctttaagcaacacggagttctgaatctgttcgcgaatggagttgtctcttgcttcgtcttcgtctggttgcacatattcatttatttgtctacccttcacgtcatgagtaacaaataagcgcagcttattgaataggtacgggtttatatctactagcacctcagactcgtatgggccctgtgtggcatctatcatgagatccttcttcaagatgttggtcttcggcttcacaaacttgttgttgtactcctgaaacatctcctggtagaggatctgtttatcgttgattaaatctaggaatctggaaattacgaaataaaatgtagccgagattgatgctatcgatccaatgccaaaaagcatcgaagacgtggaagcaatcgaagtcaagttgtggataagaagcaagttcacggggtttaatgtcataaatacatacaaggagaactttgatggatcccaaacattcaactgccagatctcatcttcgtttatgttttcttcgtcatcatcctcttcttcaatatgagtagtgtcctctgatacttgaaaaaagtgctcagatatgtattctagcactttcatcaagacagatattgattgtagtgaagacttgaggacagatgaggaagccggcttccttttacaatacaacaatccgtatgatcttcttgctgagaagatctggaaagtgtttacaagggaaatgactattatggctgtggaaacagtgttcaagaaccatacaaatgaggtggtgatgtgtttttcctcagacgcaataagactacgtctatttcctgaaagcattgaactcttcaaacgttcatatttatagtagtcagagctgaacaaggcattattggacttagagttgatggaattgtagtagtttaatactgcctgtatcacaaaggaagtcatcgttagcaagacccccaagggcatggctatcgtccagatgtattcatcccattctatggaaagggcaacctcgttgatatagagatagaagtcgaagggatacgacttgatcttggagaaaatcgattgtctgcggatgagtttcttagccattgtatgttgaatagagtatggtagacttaatagttaagtttaattaataaggaacaatatacaagcacaaagtatcaggtctatgataggtatggatggaaggaaatgactttagtcaatatgagaattagcaattcctatggtggacaatttagtatcaaatattctcttcgagtactaattagatcgaatcgtatacaaatttaacagtaaaatagtatacagataagtttttataacttgaaaagagatgtgctttctcggtggctgctctgttcaataaacagctcttatcggtctaaccactttgtctatttatcttcgtacttctgatttctctttttcttttgttctttttaatttttttaattaatcctctcttttattcgcagattttgtttgtttacgcgttaaagtaaacacagaaaatattgactgcgaatatcaaatctttaaattattcaaattattcaaatgacaatttccaactttacaatttcaatacaagcaattttataaggagaagatggatgaccacactataaatgctcttcagagtaagaattctgagttgtaccgtcggctaaggctgctcttgaacgaaacgagcgacggagatccagacatagatattgtcaaacagactctaaacgatgctgatcctcacatcagaagaaaacaagccgaattaaccataaaaccaggcggtaattctactattccatctaaaggatcaagggaagaaaataaagaaaactggcgtctgaaacatttcagccaacttaaagaaactgtagaagaaatcaaaaaggcagaatacgatttgccaaagagagaaaggatagtaaatatgaagtccaaacctttaaatggaaatccagagcacaaaagaaatgaggaattataccagagagacgtgaaagacccattggagccttctagaatcagcaacgactctggctctgcttacagagagaagagtctttacgcaaaaatcgatcaacagaataaattgctcgctagtctaagacagcaagtacaaaccaaagatatagagagacaagaattggtggaggagttccaaattcagcaggcaaacattatgaaagaatacaaggtcaacgaagccaatatacggagagaccacgaagcacagctccagcgacaagtgcaacaaagcaattctactctaaattctaggatagctttattagagtccaagttagatactctgaccaaaaacgaagaacaattacagaaggctatcaataaaatgtcggcaaagttagtttcatatagaagggatatccatgacttacatgaaaaaaatgattctcttgtatctataaacctgtttctcaccaatcaagttcgtcaattagaaaacaatgaacaaagaagaaaagaagaagggaagaggttggtggatcaaaaaagattagaacaacaaatgggaaatggtgaagacaccaaaaaagaagtacatattcaattggaacctacattcaccgatccattagacgacgatacaaaccagttggtttctggctatgctgtagacactacaacagactacttgattcacggaggttgcttccaagagccaaatcattacaaaaggtctcctaaaagtttgaggagctatcttctagcagtattgttcatctccagattgcagagacaggtaaaacacagacagagtatcaccaaaaacattaacgatctatgccatgatgacaagatcgaccttaagttatacacttagactaatgactaatgaacgttcaatcagtaacttttatatgattaaaataatgactacgattataaatgtatttatcttgatattcgatgaatcgtaattgtactgtcgttaagcttcgttgtcaagtctgtagaaatggtctctgcatgtgtttgtcaagtcaaatggcaagccatacactggattgattggacctgtgaatgagttcgagtctatggttttatacataaacttgaatgccaaaggtatggagtcttccttttcgtcgtcatcatcgatagtgaacaaggtttcacagagactcaacccacaaagggtatagtttgtgtggtagaaatccaccagcttgcctggtttatctctgaatccaccgccttcagcttgggcacaccggagaatgtagtggcccaatgcttcacgtgaaaagagttctccttctccagtaacggactcaagcattggatacaacgctccgatccagaaactgtagcaggcatctaccaacttattagttcttccactgagtcctccctctacaccatattgtctcagaaccgcccatttgatcaaagcgtccaaatgtacagaactcttttcctggaattgcgatttcttgttatacaaaatgaaaaagcttgcaagagcacagaacgaatagccaccatgggcttccgtatatgggactcctgcgaaacctccttcatatgtttggcaagaaagcaaccattctgctgtcttttctacaagttcgtcagtcacaatgttgagaatcgctgctacagataaaacacaataggtagatcttgtatcgctctcacctcctacgtgcattgcaaaagagccgttgggcaatttcaagcttatgaaccatttgtagagattgtgcctgattttgtccaaaagctcgtagttttcagtcaaaatcaacgataacaccccagcataggttgaggcagcatggcccatctgattggctcctccagctattcctcccaaaccttcagaacggatgcatctggaaattttgtcgtttataaggtcaactatttgtgccgttaagggctcttccagtatgagcagttgcggattcgcaagccagtacatcatccatggatggttggcatccaacaggttgtagtaatggggtaattggctctggagtgattttcttacatatgccaagtgcaacttgtccagaaactgaagctgcggatgttccttgtaacattccaaaatcaacatctctgtatcctcctggtcgtctacagttttggatatgtagtcgtcttttatgggagaatcctggggattgaacgaaaactcggggtttgctattttgtgaatcatactggatttcaaatgcgatgaataaatgtcctcaaaatcgtcttcactatcaagtttgttgatttcgcggtcgctatcgttatcgtgagaaatattgacctcgacgcctcttttcctaccaagaagtttcatgatataagctactttttccttgtctttggccataattatgtgagatgaggcgaaaattatgtgcttcgcgaattcttcaattgttatttctttttggtatttttgcttctttcttggatctatacaatcatgagacggtggttatctagcagtcccactcttttctacttccaatagtgtcaattcctgtggtgtttgcaaaataaatatgtttcgacttacttgccttttccagctgtgacaaggagtgaatcattcgatgcaagaatctggggatcagtcatgtgatgcactaattttgtgaaccaccagaaggaccaagggcgtacaaagaaggcactataagagtaagtaagtacatttctgaaaggatagtagcaactgtatacgaagctgaagatgtgtattacattgactcaactgtttacgaactcctttccttcatagcttcagccaaacatctcataaatatttagcacaaaaaacgcattttgcacccaaaagaaagtggaagtctctaaactaaaaaagcagagtcatacttcctaaattaagaaatttcttaacgaaaatcaccaatatataactcttggaatcaaaaaaagtatgcgatttctgtggatcgaacacaggaccttcagattaactgtgactgaatctcttcagtctgacgctctcccaactgagctaaaaccgcaaacaaacccacggcgggagtcgaacccgcaatcttttgattagaagtcaaacgcgttaaccattacgctacgcaggcgccttgttgttttttgagagactcacaattaacatgatgtgtataaatcacgtttttgatcacgtgatcaaaatatttcttaaatagaatttttattaaatagctactagtccaggtaattttcagatcaatgatgaactggatgatagtggaaagattctatactatataagtatgttgtaatttcaaagaaataacagaaacatgctccatttctgtacatttttattgcaatattgtcaatctttttgaaaaatttagtgaagaagttgcgaattgtccatgatattgcactagtaatatttacagaataaacaaattacgccagattcaacttgtaatatgttatatatctggtgaaattaactctcaattctaaacgtaatcttattttacttcaaaatcaaccataaactttgactatcttcaatgattaattaactccatttcatcacgtgatacacctggggaattgtataatcaaatttaacaatccagtaactgctttaagctactcttttctttgctaaaattgtgaaagtcaccaaaatgtctcgatttataagtgccatttttggccgatcacagcaatacaatcctcttcccaatacaaactcggctatgcttcccggcgcttttccgggagaggagcccatagctccaaatagtggtaggaatagtaccaattccagttctatgaaccactttttccagatagtactatactggatcaactacttgctcatcaaaccgattataatattcatcattatcagtttgcgtatactaactaagtttcttaacattatatatttcaaagatcaaaactaccagtctccacctattagtgttacagagaatggagctcccgttcccaacaatcatagcaatgatcctatagataaggtgaatagatttgttcgtgacttagaagataatctcaccgcagaacagatattactggaaggggagtatttgcctcctttctaccaaggtagctatacgcaagccttgtacatgactacgaacagagccaagttcttgtttgtgtatttgaccaatccccataatgaaagttcgtctacacttttcaagaaggtaattacaaatcccgactttattaatttattcaaaagcaaggatatcatcatttggggaggggacttgacgaatccagaagcttatcaattagcaaacagtttgaatgtgacaaagtttccgtttttggggctcttatgtttaaccagaacaactaagatgtctccgcaaggtcctataaagactagtccgaagatatcgttgattctgaagattcaaggaggtttcagtgaagatgtagatgtcagggttttgatccagaacaagtttcgcaagaagataggcaagtatgaacaagagttatcgctgattagatcagaattacgggatactttcttgaaccaagtattgctcaaacagcaggagctaaactaccaggagtcgttagcaaaggacagagccaagaagttggctaaacagagggaacatttgaggaagcagtacttgctataccgtgccgactatttcagacagttgaaagcggacaaaaacgctgctggaaaggccaagattgccataaaattcaccagtgggatcaggacaactttcctattcccagcagagtcaaaggtagatgatatctttatgcttgtagagttgatcaataggggatacttggaagacgacagtgctatcacaactattagtacagaggaagcagagtcgaagtttaaagatttcaccatggactacaagttcaagttgacttcgccattaccaccacggacgtcgttgaacgatgttatagattgccagatcaaggatgtaggcgtggtttatcccaatggggttttgatagtggaagatttatagataggaaatggataggtatttctacaattgtattgtatccaactgtataaattgactagacttgtaatgtgttctgtctgctttcgttctctctggttactacctcgtattcttcttctactatctctactttcgtatttcatatccggtaatgtacattatactctatatacaattatgctacttggacaccttgcctttcttactcttcttcttttcctttttcttcaagcctacgaagcccgtctttatgacctggacgtactcggtccagaattgatccaaacgctctgtctccactactgtagacaacttgatcttgtccttcttgtcctttatgtcctttccattcaacgacactctgatcaagatggggtatgtggaggtattctcgaactcggtgtcgatgtgatttacgttggacagcaagtcgtttatcacgttgccttttccagcatcatcaatgtccaaagctggtatcaatctcttttgggtcaaatacactgatgattttccgtcatttttgcccaaaatatcggagactttctttaagaattccgaattgtccaatcttcccatattgcgtgagatattataatagttgtagaatgcaaaatggtacggtagatatcgtggagtagtggtccttagtgtagtgtgattcgacaagagttgaaaattttgactttcgcactgaatacggtggagaaaaatagaatagtgagagttagtgagagcaggataagaaatagtgagagacaaataccgagaaatgagagttagtgcaaagtattagggtataatctgaagcgcaatggtcattcagtaaacgaagagagtattgagcttggttagcagctcttatggctagcatacacatacttattctctgtctaggtacattattgtgaggctgtactttcattctgctagagtctcttcactacaattctcactatttctctcgccatctttctccccgtgctgttagaacgacgctaaattctatattctgttcttgtactgggctcaatcttctagattccaaactatgtatatttgtagacgcttctatctctaatctactctcccaattccttcctacactgccttcgtcttgcactggaacacgcttaatacgctgttcccgagtctccctaatttctgtgcaccactacggccccatacgatgatgtcacaaaagtggggaatctgcttattttgcacctggtacggaatccttatcagcaaaatcgaaaaacacggtcctgccttttcagaaaaaatgaaagggagccgaagcacactttcttaccaatcttataaatattataaacgatagaaacatttggtcttatagtatccttgctttttattgatcactgtgagtttgaaatccttccaagaggacatagagaataatctcatcgcctcaaagaaaaattgttgcttctactcgtctacattatagttgaagatctgaataagcaaaaacaattgaaaatctaacaacagctcagaaaatcaacagcaaaaaagtataaaaaaggatacttcaatatcattcaaaacgaaatcaatacaataaatcaagttatcaataaatcagtatacccctcgtgttagtactgtcctagatcgtatattgtactatatcacagtattagcatataccgttactatcacttcaatgttactacaaaagtatcatcatccggtcactattcatcacatttcataactcctttacacaatagtattgtctcatactactatttctatatcacaagatcacctctactatatcacgtaatacaaaatgctggacactagcaaccatcttccccagcggttgatctctttggtggtctccatcttcatttgtttggcgtcagggacaccctacttatatggagtttattctccgcaactagtccagagagttgggcttaccacatctgattcggctactatttcccttgcttctaatatcggttccggtgttggtggtttgcctggaggattgatgatagatcactttggcccccagatctccatcttggtcggttctatttgtatctttattggctactttgtgttgtacaaaatctaccagcacaaatacgatagtcttttcttcatatgtatttctattgcagctatgggctttggctctattacatcgtactttgctacgctcaaagctgcccaggcaaatttccccaaacatcgtggtgctgcgggcgcttttcctgtgagttcttatggattgtcggctactctcttctctgtgattgccgctactttcttcaaagacaatactggtggccttttagagttcttggcaatgttctgcggcatcgtagccttcctcggttcattcttcatccacatctacttggatcacgaagatgaagaacctgatattgaatcccacaagttggctagttctgaagaggaagctgctatgatggaatcttcaaattcgtcgcccactgtagtggaagagattgaacaaccaggagctacagctgcaaaattagaaagatcagactctttaccaggttcgtttagattctggggtctaggctcacgtactcccagatcttctgtctcatcttcacaggaagatatgcagccgattctccagaatatcagagatcaaaacagattgcaacaacaatcttcaagcacaaacaataacaatccctttttatcgcgtaaggattctgccagtagtatgaacccatctcttgggacctctgcagcttcaaagatacaagctctcaaatccagaaccagcgaagcaagcttttctgtttcaaagactcctacagctccaagaacttcctttcaaatcattaaggataggttaactgataagattttcttgacgcactacttcattgtctctatcattagtggaatgggccaaacgtatatttatactgtaggattcattgtcactgcccaatactactaccataaagatcaacttgactctgtttcaacagttgatacaactcccagaagtggaatagccggagttcatgctaagattgcatcgtccgctgcagccttgcaggcactacaagtttccatcatctcaattggatctttttccggtcgtttattctctggatttgtcagtgacttcattcacaagaagtatcatatccagcgtttgtggattgtagtagtcacaattataattcttagtgttggacagttcatcacaatcactaacgtcaacagtgcccatttgattagtatctcttctgcaattatcggtggtagttatggattggtgtttggaacgtacccagcagttgtagctgattcgtttggtacaaaaaccttctccactacttggggtcttatctgtacgggacctttgataactttgtttttcctcaacaagtactttggatacatttatgatgccaataccgattccaaaacaggaatatgctacaaaggcaatgaatgttataaaggagcgtacgagctcagttttttattatgttttgttgtttttatcacgtctctagtaatcatttatgtacaaaggaaaaaacaatagggtcacaatatatagaagttaattacatgaaataaatatatatacaaaaccttgggaatatcgttagcatcatgttagtttcaccttcttcattcatcagtcaacagtgtagacgctttccaaatcaatgtcattgatcaattgacgttggtagctaatcttgcctagaagagcatggaagtagcctgaacttaattcggcgttcttgatctctttttccaagttctccttctcaatggctctcttatccaagctagtctggaagttattcataacctgtcttgaaggataactcaagactgaccggcactcattggctactctgtttgagttgtggtggggatagtccaactcaaatatttgtttcttgattcttcttgcttgtttacgcgggaatgcattgggcatgtcgctgatcaagtagtatatggaaaaaccagaaatacctatgactacagggatagcaatctttttcacaacggagggtgtaaccaacgatgaaaagtcatacatctttctgatcaaagcacccgtagtcaaaatcttacctgaattgtaaagggtatgtaaggttatctgagtaggcaattggtctctcaatgcaaccacgtttgttggaatgctggacaaggccgttacaggattgaagtaatcgatctgctgtctggtagcagacacatattcttttggtattcctaaccataccaaacaagattcccatgatggatcaaagaaatcgctaaactcaatcagattgtgcaattgtctttcaacagaatcacgctttctggtgaacatcaagtctgacctgaagactttatcatttaagaattcttctcctaacgtgttctgtccaaacttgatgatttcttcaaccttggcactagtaatgtctttagccttgttttcacaagtctgaacacttgccaatatctggttgatcataacttcttgagtggccctggcatattcgaacaaatattgtaagccctgataaggcacaacctgctgatctcctagctgattcacaacattcaagatctctttcttggacaggttgtagatatcattgcaggtaagttcaatcaaactgttgatcatatcgccaatcttagcttgcttagtcattatctcgttgtatttaggggctacttggttgttcaagtccttcaccttgtcgtccatttcctggagatacaccttctcgttgagctttgataacgtctccaaatcattcaaaagattgagcaaataacttttagcaggtaacaacttggaaatggatctcttatccaatataaactttcttaaagacgcctctagatgatcaaagtcaggattgttgaagtcacgttcgtcttcgttggggtcatcatcatcaccaggtccgtctccatcgttaaatatttctgacgaacttacaaaatgcacaaaatcttcggcgctcttatatgaatcaggcgacaagctcttaacctgatccaatatcttcttcttacacttttccttgtccttgatgttgtcgaaacgattcactacaatgaagacatatctcttctcagcagcagcagcagcaatgaactcttttgctgacaaggtgaagtggttttctgaattgactacaaaaaccaccaaatcaatctcctcttgtctcgaaaacacctgagtagtttggtacagatccatattcaagcccggtgcgtcaatcaacttgatgtctataatgccattgtgtagcaaactctcctgaaacgaacggttgtcaagaacatacacctttaacaagctgtatctatcacaatcgtagacgagttcgtccaaagctttcaaaggatgaatctcataggtgctctcgtccctgatgttatagtctttaccaataggaaccgcatgtacttcttctacgcttctattttctcgcgaggcatcaattacttcgcagaatacagatgtacatggctgctggtcttccggtaagatctttcttctcaacaaggcgttgcaaaaagtcgactttccagcattcaaatctcctgtgacaaacaccttcgaagaagtatcatctattctatccttcaagttcaacaagtagtttacttggtgggtaatcttcttctccaataacttggctatagacttcttgtctaagttggcaacaatgttatcagcggacagactgttgtggccgattttgatattcaatttcaagatcttgaactcaggcaacttctctacatctacatcgtcgtcgcctagaatcttttctttactgatcgtcttcaacgagctgctatttctcaccaaggccaagtgtgctttggttgagttgagcaagatgttgttttcgtcctcgacatcagtgggatagaaaatgggtctttctttgttctcattggagagctcatacatcaagtctattgtctggttgatagacctatccaacgcgatcttattttcattgtaacgtagctgctggatcgacgaatttaaagcttgcgagcgcagcagctttctagacttgtttaggaaatttgcagctgagttggagccaccctctccagactgtccctctatgagcgttgaggaatcgtgggcaaatcttccttcgtgtggaatatacatcaaactggctggattgctgcccgatagagctgctgcaaggtcgttatctcctataagcgtcgaagtcgtctcgtcgtcgctattctcaaaaggacctggttctccgtccttctgtgtattgtcgtcatctcgtggttcgagatgaataaatttttttggccccatagttgcagaaattcgctgaactttgaatgagcgaatactgctgaacagacaagtattcttgccgagtttcagcgcaaaagaaacaaaaccggcgtggctagttcacactgatgggaaaacatggtggcaccattctaataaatttttgtttgctgatctaggaagacaaaacaggaaagaggcggatcacgtgaatatataaaaatcgggaatacagatctatagttatagagtacgtgaagtattacgaataatgatggttttaaaggcttcaatataagatggagatgattgtatacacctgtgttcttgataatttgactgagaaagctcaaaaaagtggtctactatggaaatgactctgttcaacgttcgctgctgctgtgaaccaagagaagtctaaactgattaaaagcatcggaatatttgcgataaaaagatcttcgtcgtatcggtacaagtctatgaaagtacatatgaaagtacaccgttgatatacattgtgaaatatggattactttttagttggcacaattatatgctaattttactagcacaattccgctcacgtgaagataaccgttatcaattcgcgcttcgacgaagctgctatataagatagtaaatcagattctccagaagtgaattttccactctcattcagcaatgcccttaaatacttttacagtgggtggtatacctgccataacagctgagccattaacgccagaagcgttcgctccatttggtggagtcattagtgctgaccatcagatagagaacgcagccagctcttcagccaactatggcactgctaccaagatccataaggtagcacccatagtgaacaactacgacaagtgccccagtggagtagttgccactgccaattggaatattttccgatgtacagcccctaagcatttgatactggactacggaacttacaagagatacacttccaaagtattggaaagacatcctttctcaacacagacctttttacctatgggacaagatcttcataaggtatcgtacttggtcattgtcgcagccaacgatcctcattctggagcacaagtgctacctgatccatctacagtacgcgcctttgtctgtaaagggaaccaatctgtaacctacggtgctggcacctggcatgctcctatggtggtgatagatgaagagacagcgcatatagactttgctgtgttcatccacgagaatggagtagctgacgaagattgccaagagtgttactttaagcctggtttctctatcaactatgaaaaagtcaaccataagctatagattaattcagatgtaatcgatcatttcctcgataatgttattgatgtaaatctctctctgatcagaggtaagggtccgtgcattatctcgagcaacttgtaatttcagcataatttcagagagatccatagtctttgtatcatgttcttcattatgttcttcttcatcattgtctacctcttcttctacgtctagaagtcctttagtcatttctttggctctattagtcttattcgtttgataatttactgagacaagatccatatgggtccattcatgggtttcgatcaactccaccaatctatctgttcctatcttctcgcgaaactcgttttcaccgttctgttgtaagtctataaactcaagtccgttggaaatcactgcatcctccacttgctcaagtatcgattcatgcgttggaactgatgatgtagtagttcccactattgctagaaatcccgaccagtcgttttcgtcgttattgcttagtttttgccgtattcttcctacaaattcgagacagctttcgatatggtctatagaatcgttttctatgtcaatgcagaagataaagccatctagaacttctctgagctcttggtactcttcgctaacaaactcgtcagtccatttattcaaggattgcaaagctttctcacctgatatattggccgatctatgttcaggaaactcgtcaatcaagagattcaagtctactgagtagtattttgttgtcacggatgccttcatgatgattccactatgcgaatcagatggtacttctcccaattgtgaagatggcagatttttggataagatattggccacacggagttttccggaccggggtgctccaaggatgagcacatggtttggaagcattcttatttataggtgttaatagaagtcttgaaatgaattttatggctgaaaactaacgtgcaaagtgaaaaatttatatatgagaactgtgaaactatttatgagagcttaactatgggagcttaactgtgagatcagatagcacatccatagcattagaaacaagctcttttctacatcaaaagcaaatcttcccagtcaccagaagtttctacataatttgaactctagtcccggctttcccaggcatggacctgttagattggattgctacattcttaactatggaatcaattggtgcgcacaaaaaaacacatacttcatattgatacttcacctccaaacatttcaatagaataaaaacataatcatattcatttcctctcccatctcattctctctgtttcttcatatctcaactatggcaccctctgtggtcaacggctctagaaatggcgatgtctacaaggaaaacggcgaatccaacaacgccaaaatagatacgcttcatcttgagaaccttttgttaagagacgaaaacatctacgagacgtcactcagctccgatgactacttggagagtttggcaccaatcatccaggacgctattaaagccaatggcttgtctgaattgattcagaagttgagcggaatagtcaaggaaaaagacgaagaattgaatgacttgtcgttgaactctactgacgagatcaactcatgtatcgacactatcgacgaaatccatcatggctcaactgaattgaacaagagtttgatgctggtgagtcagcaactcaacaagtcggcgtttgagttgatgtcacggaagaagtcattgatcaagaacaaagaggtatccatccagatcaacgaaaccatcgtagtactcaatgagtgtattcaagtattagaaaacaccaatagaattcacgaattgataaaacagaaaaactactttagcggcttgaagctcatcaacgaattgacttcggtacacttgcaaaaagttgaagactttagttttgccaagaagatacacgattccattcctcatcttacgaagatgatcaaggacgaggcgtttgaaaacttgtgcaaatggctttcgataaattctgaacgtaagctcgatgctatcagtgatggaatccaggaaaacatctactacttacaggatacctggaccgaaaagaaaaagggcaatgactccctaactccatacaaattaaattcaccagttgaactctccttgagagaccccacggcttattacaatatctttgaggacacttcgttgcagatcaacttggacacgatattcgatgccatattggtgtaccaaacgttacacgaaggcgacatactatctactttgtaccataaagaatggatgaagaaatacaacagagtcatttaccccattaccctggctacagctgaaggtgtagcacggtttcagagcttgaaggttttggacgactatttgcggaaaatcggcgcattctttgtaatggacaaacagatcaacttagtcactaagttcgaattgcgttctaacaccacttcagatgacttatgggagtcatatgtaaccaaattgatcccagtgcttttggaatttttgaaatcgcataagtttaagaaaatggatgacttgcattccttcaaagaaatcactggtaatttcctacagataatggaaaactacaactacagaatcactgagctctacgaagtcttaatggttctcttcaaggactactttgctccaatgttgatccaagagttccgttctgatttcatcgaatccatccagtcagaccactacatgcctctcacagtagatagaaagagcgactacgaaaacataatgagaatctgttggtacagagaagatgcaccttttgcacctaaaaacgtcacgaagatgcccataaccttcccattcagtgaagattatgttcactactgtcttggagtgcggtctttattagaggatattatatcattcattggccaacactacagttacgagttaaacgaattgaatcacattatagtaaacgatatatttgagagggtgttgggagacgaaaaaggcgtgggtatttgcagagatatccaggactttattgccaaaaatgagaacaataaggaagttacttcacaaagttataccaacttggagtactacttgttcagtctttatgagatcggtaagttgattaatcgtcgtctcagaagcaacactggtatcggaattcataacatcgatgccaatgacaccttcacattaagagctgtagaccattacaacaacttgaagaaatatgctgaaagcaccatcttcaagatggtggacggaaagatcagagaattgttggatatggttgaatacgacgactggttaccaacgacaagaaattcagaagctaactactctgtgaaggattttgctctctttttggagaacttgttcacatctattttctccaacttgcctcaatccattagaacgttgggtttgttcagaacatatgattttgtttcagaacatttcttaagtgttttgaacagtgctacgggctacaataaaattgctatcgagaactttgatttggatattcaatacgtagaagaatccatgaggaatctatacaagatgcatcaaagtggagagagtgaaagctctcaaggaaacgttgcgcttgagacgacgtttaccgaattgagacaatgcatcgatttgttgaagttggacgactatgacgagttcatcaagaactctgcattcagaatgagaaactttgacagaatcaaatacgaagacggagtggcattgatcgctaaagtacaaggctaccaggaacccgataccagtctaaatgccgacgaaggagactttggtgaccagcagtcgatcctttccaacgctgccgcttccaagtttgcgctgtttgcaacgaagttccgaagggaatgatgttatgtaggcattccaaattatttatgatgaacagatacagtgtagttgactataattgatatgggttatttccacatccataacttgtaccattttctgcttgaatccgcttgtaattccaacttcttattgtcgagtaagttctggatggtagattccaactccttggatctggtagttaattctagttctgtttcctcacgctcaagtcgaatccagatggattgaagaataatataagtagtagaggctgcaagaaaagtatgaaagagtggatgtgcgaactggcggatctggggttttggttgttgaacggctttcggttgaaaacctgcttctgggaatttaacggtagagtaagacctcaatgttctgaaaaccgagatagctttcattgtgtaaaagtaatagtgtactgaattagatgtagaaatgcaagaagctgaaagtaaatgaatagcaaatataggaagtaattctctagttgaatcggactatgtatatgaatctatatggaaatggattctagaactgaatctccgaaaatgaattgtatgagaagaatggaaatgatttcgctagcagttctgttagtcgcactcccatagttaagctcgcatagttaatttcgcaataatttttcagtctcatttttctacacaccatcaacgatatcaaatacaaaaatttcagaccccgaacaacgtacgattctctagaaaactgtttattccgacgcagagagatagaagcatgttgggaatacgttcgttatctttaagaacagtcaaggtgcaccttgtgccagctagggtgtcccgtttgcgtagtttgcactctttctcccgagtttttcaggaattaaatggccagaaccaacccaacagaccattgaaagttggctctgaaaccttgcaatctcaagttgcaaatgcgagaagcgcagaaagagctcatttagataagttaaacaaggaaagagaagagagacagaagttcagaaacagaactgctgcctactacactgcttcattaggagttgtctttctttcacttgcctttgcagctgttcccatttatagagccatttgtcaaagaaccggatggggtggtataccaattaccgatactactagattcacgcccgacaagttgattcctcttgacactaacaagagaatcagaatccagttcacctgtcaatcttctggtatcttgccatggaagttcactcctttgcaacgtgaagtttatgtagttccgggagaaacagctttggctttctacagagctaaaaacatgtctaaggaagacataatcggtatggccacctattcggtcaccccagaccatgtggcaccttacttcaacaagatccagtgtttctgctttgaagaacagagattgagtgcaggagaagaagtcgatatgcctgtgttcttctttattgacccagaatttgcaaaggatccagccatgagaaacatagacgatgttgttttgcattactccttcttcaaggcagcttactccgaaggagaacttgccgcagttcccgttgcttccatagaaatgaaagccactgttgcttgaagcaccaaaaggtgaacgacacttattctttagactccctaaacgaacctttatgaccaacaccagtttgcccttttgtaaatagctttgtacatatgcctaggattatacgtaaacgaatatatgcataatattgcaaccgttggataccgaagttatgtcaatttacattgtcactccacccccgcgtaacttataacaaaagccattgaacaagtttcccattacagccccatagcttccgattggccctctgtagagaaattaccaagttgcaaaaaagcgagaagcggatcagcattgcataggaaaagtacgccattggctcaaaaaaaaaaaaagatgcactgcaactactaggtgtgggagtacattgcaaatcaattacggtaatgttatatgtaactatttcaatattgtgtgttttccattgttgatgttcatgtaaactttaactgattaatgcaacttacaagagttaaattctacccaataagtgtccgtcctattccaattaccacacaaatttttaagtttttcaagatcaacctaaataaatttcagacttcctataccattctttatacacttaccactactggctacttttagcgggcatgtgtaaaagggattgaggctccaagccccctctgttgcaaacaaagccttagattacccgcccgtcgaacaatttaagttagataaaataatcatgcagcccgtaattaaataataatacaatatgacagaacaaatatattttccgcggattgcatttttgatgaatcaactgaaaatttgttgcaactgacctgttcctaaccatagctttgatgggtgggattcttctcccacaaatcttggctccatcaagccacatgtctcctgagttcaaattcttggcagaatgaaactggctaaaagtcctcttccaagagcattcttctacgcatctaaaatcgtccaatagctcaacgaggctgggttgacgtatcagtaaggatactttccttaagtaaagatcaatctgataactttgatcggtctagcccccacgtaattgttggtttgctcccctgcaagacttgcacctgcagcataccagtttcctgggcagcaaataatatattgataattgaagttaaaatacacaaagaccaagttcccttgtgataccggaaactggattcaataccgaatacaaggcagtaattatattttttatttttgaacgcaaccagttactcgtagatattcggaacaaacccatgttgcagagctttccggcacttgaagttcttaaactatttgcaaagcgaacacctatttctacccgaaaataaaacaatgttagtaaccttttatggtgtgcgaatttttttttcaattgcatggtaaccattctttccaccagtgcacaaaatatgcaagattaccaaaaattagtaaagtaacatctgcgtcccagtgtgtattgggttgaatttgtgatgtggaatcctattctccattttgccgggtcctctagatgttcgtttttgttgcatcgcctcttacttcaggtgccgttttgtatttttatgatttgttcaccatacaaacctgttacctttatggctcgatcagtgatagtaccctattccagttaaactacaactcaatttgtagaatattccatctctgaaaaacctctttctgcaacggctgggttctcaatttctcatttgtatttcgtttctgttctgggtcttaccttacttggtatcatcttatatgttgttgacttgggcattttcgtaactcttctgctgaatgataaccatgaaaagtctccaaaaaataagaatgcagatggccaagcacagcaacttgttatccagcccaagcagtagaaaatggtgagatattcttttctacatttagctattgtatgtcaactatccaaggttaagaaaatatattagccccttgtctttggatcaataatccttgctttttcgaaggctataattggctgtagtgccaacaaactattggccgttgagatatcaaatctgcagatgctagtgcgaatccgtccaagctaacaaaattctgtaatcagattggctgaaatcgagcatcgccgagataaaaaaaaatataatttcaaattgacatgcataattctaaatacaggaaaaattgcatttcacatttcctaagtttgttcctgaatttgctgaacatccgaagcaatcctgaagatctcaaatatattgcccaaacaaatggctagacacagagtagactttaatgacgaaagtaatggtgccggttagggtggtgcctattagggcaattctttcaggagtgctgcgaggagtcttaaccgagttaattctttgatcgttttttagatttcagaaggtgaattcgaccaatgccgatctggcccattcacacaaaaatcattacacttaaaactcctcttggcatgagagacagttgcgtgcatatataagcctactcgcaatctgtgtcaaaaagttaatgccttaatcggagcacttctcatggagagaacttggtggtctatgtaaggcgggaaaggctacccaggtgtcactgaaaacattgccaatgtcattggctgcttgaagacgaattctagaaagcttaagtacttggcattccaaccgttttcgtcttgacaatgagcttggaaacttcatttcaaaaaaaaaagaaaataatgaaaggcttgtaatgtcctcggaaatacagcaggacgacacataacgtatgcataaaaaatattacaaacagttctgagaatgtctgcatgtatcccatctgataaatttttatctttcccatcaatgaatttttgattcgtccattggtatttaaagggtgctaattggcaagtgaatcgaaatgcatcccttgttgtaggctcttgtatcttgtagcagtatcaatttcagactctcatacttatacctctgctaatatggtggctattaacaagttggcattggctgcggtcttcatgggcttgacacaagccgaggtagcctttcatattaaccgtaaaaaggaattcgctgttcaagcttgtactgctcttgtgggtaaaacagctacctacttccttccaactgataaagttggttactgtaacgtcaataaccaaccagccttgggtacctatgcttactgtatcgaacaaattccttacaaggatgcaagaaagaactttttagattcttgtgcacctttccacttaaccgaagaacagtacttggacgcataccacaatgcctccaactacttgaccaacacaactgctgatcctagcttcaatatatcaaaggtctacaacaagcctgctattttgagtaagaagaagatcattggagcctgggattctgaagttggtagatggtacaattataactatgctgcttggttcggtattgccttaatctgttactggtacttcgttatgttggttgctggtctctgtaacttgacgtacttcatcgctcctaattttgtcaagtcattgactgggggtatttctaacaccttcagaaagaccatttctttgccagcaacatttggtaagactcacgctcaccataagcaatttttgcgttacattcttattttaattccaactagattggaatcaatcttggtttttgtctggataagtttggcaatcatcttatcagctattctcttccatcacgatagtcccaacgtcatttggccacagggtcctctgacagaaattggaagaaaggttgccgatagatctggattgattgtcggttggctctctccatccttgatcttgtttgctggtagaaacaatttcatgcaatggttatcgggctggacatattccagatttatcttggttcacaagtggatgtctagaattgcatttctcttgtgtgtcgttcacggtgttggtatgacctttaatggtaaaggtcttggtaagtacgatacacgtaacgctcaaatctatgttcgtactggttacgtggctcttatagctgcttctatcatggtcttccagtcccttttggtattcagaagaacaaactacgaattgttcttacttgttcacattgccatggccctcttgttcattgcaggagcatggcatcacactgcaaatgatggttaccaccaatggtacatcgcctctgccgctgtttgggcttttgatcgtgttgtaagaattggaagattgttttcttttggtgttcgttctgcacaagttgagttgattgccaacgaaaccttgaaggtcagtgtctctagaccagcttactggaagcctttcccaggttgtcacgccttcattcatttccttaagccaaccatgttctggcaatctcatccattcaccattgttgattctgctattgataccaataccatcactttttacttaaaggttaagggaggtattacccatggtttataccagtacttgtccaagcaaccagacaacaaagccaccatcaaggtttctgttgagggaccatatggtgccccaatttctattaagaagtacgaaaattcggttttcattgccggtggtaatggtgttccaggtctctattatgaagcaactgatattgccaagaagaacgaaaagacaaacattaagttctattgggttattcgtcactacagaagtgttgaatggttctatgccgaattatgcaagcttaagcaaatgggcattgaaacaattatttatgtcacacagcctcatgttggattgaccaacccaattgtttctaagaatatcgactctagtgaagatgaagaagagcagcaagaaaagggtgctggatcggaatctgatgactacatctcagtcttgaagaaggacttgtcgcacatcgaattcagagaaggaagaccagacgtctacaacattgttgacgaaagcataaaggaagctaacggcccaattgcatttgctacttgtgcccatgctactatggttgacgatgccagaaagtctgtcagagataaccttcaagccactaagtacagagttgagttgtttgaacaaattcaaatgtggtaagctacttcatttctcaccattcttgttactagcatttgcactctttagagcataattttaccatatcatatttaatagaggagttttagagaataatacatataattgaaattcttaaagttctattattctaaagtgtcatggcttgcgtcggctatagtatgtttgcgactggcagtgaaatttgaagctaattgaacgatttaactatcaactaactccgagaaaggtttgaactttcttcctcgaatagaattcctggtgaatcggtttactggccggaaagctactacctcttccgttagttaaccgatccatctacttcctgaataagtccgagttacacggagatgagaggcagtgtatgcaggtacttggcatttccttctttttgcaaccgccgtaactcggtgttaaagtccccacaagaagggttaaccatctgaaatctagacataggagcatatcattgattcctccgacgatagctccacccgagtcggttctaaggtagacaacaaggagacacactatttaagaggattatctgctgtgataaaagtccaatttcttgtcaattcatcaaataaactcaattgattgctcttgctcaaaactatttacctattttatcatgtctcaacaacttgtcctagtcaccggtggcactggccatgctggtaattttatcattgatttgttgctcaaggaaggctacaaggttagaacttctattagaagcttggctaaagagcaacaattgcgtggtctctacgaagatgtcttcggaaaggaactcgttgacaagaatttggaaatttttgctgctgatcttggaaatgacgctaattgggaagagaatttacagggagttgactacgttcttcacgtcgcttctccattcccattacaacaacctgaaaatccagacgaccttattattcctgccagagaaggttcattgagaatcctcaggttggctgctaatgtaagctcaatcaagcaggttattttgacctcatcgtttgcttctgttggatacggtcatgatccaaaccgtacggaaccattcactgaaaaggactggaccaatgtggaaaaggatcaaccaccatatcttttatcgaaagttttggccgagaaagcagcttgggacttcgtagaagaaaataagcctcactaccatttcacagttatatgtccctgtggtatttttggaccagcttatggtaaaaccaagcagctttccacatctttggaattgattaggttgacccttaacggatctttcaaggaagtcggcgttccaatctacagatttggggttattgatgttagagacctcgccaaaatccaagtccagtgcatcaacaaccccaaagtatacaacgagagattcttattggctacaggtaaaaccttcaatttcttggaagtggctcaaatcatcgcaaaggctgttccaaaagaacttgctgaaaacattccaacgaaagagatggatggtccacaggaaccatacaagtccatcagtgtacaaaaggttaaaaccacatttaactgggaaccaatcagctctccagaggaatcagttattacttcggccaagtctgtcattgcccttgggttgtagtgaagttcaaatatcgcaccctcacataacaatatctacgtctaaatctatgtatattatgtctatatctatgtctatgtctataccaatatgacaatttaaagaacttggaatgaactacacatacagaggaatataagtagtcttgaacggattctctctcacgacttcaaaacgaagagggtgtcttctacatacactttctactccattttgtatcgcaaaacagggtcccagttcagacgggctttaatctcactcgagtatgaagcgagaaattagaaaacagaccatattacgagatccattgtagcgcagcgtacagtcattggagtatcaaagtactgtcagcagcttgcggtataccactgattcatcgtccgacctaaccgcgttctgtccatactggcggccgcctgagagtggttgctgtagttgtgacagaagcctgcagtggttctggttttgagcgaatacgcgtccaggatttttctgctttagggtgaaattcagatttctgtggatcgaacacgacaccgaaagtgtgctggagaatcaacatgaaaccggaggatccagcatgaaatgcctgtatcatgaaagtcacgtacctacacgaaacaaaaatacggtttcttctttttctatttatagtggaccccgcaagattgctaagaaatcctggcgattgcaagaatagataagccaaacaaacctgtcaacaaataagagtacgatgtagagtagcacaaaagcacagaccagtggataacacagaaaagcaggactcagtagctgaaatgaaaacagtaggattctcgtcaaagactcgtctgaggcaatcgtacctggccgactcttctctggagcagttcctctacacaattaccgtggctagactccttctgtagtgtaagcgacgtcctgtgtcaaaatccaacccgcagtcccctttggtaggcaaataaacaaagggaaaaagtttcgcgttttgggcgctacacgcaggcttcgcgaaaaagtttcataaatagcgacaaatttttggatcaagtcaaacaaaaacgtctagcgaggtttcctgcttggaagttgattcgtttggttgattttgttgatttttttgttttgattgatttgggtgatttgactcgattgcttttcttcgtcttgaattggttttgttcaatttgatttgatttccgttctttactctgtggttgctcaagcttcataactcagaacttttcaccttggttggtatcagttggacaattttccgttgatctcattgaactttcgccttgatttggacatatttattcgtctcaacttgatagcagcactgatttcattgacattaccattgttattgtccttgacttcatcgtggttcacatcatataaaaaattagcttcattctctgaacacagtcactcgcttatcctcgttgttccagtttgatttcaaaaaccaaagctacgtcacaccttttaaacgttcaaaatggtatatttcccacccacacctactgtagatacacatgataaggccgatcttgttgttttggctgaaagggccccatcctcctctgatccgtgcaaacacagcaacgctcacggatgtacaaagccagtggccgaaaatagcttgaccatcgctttagccgttgtgattcccgttgtcgtcattatggccattcttgggtttttcctctacaaaaactaccggaaggacaaaaaggaagccatggaacacgatccagactttgacgaaaacggggaagctacggctttgcccgatttccctaagggacggccattccccatggaagatcctttccataacagaaactccgtcagatacccccagtctggatttaatcgttccactccttcgttggtggctacaactcatggagatccatatttggacaacttcgtgttaccttaccatcatcaaactggctccaaggtttctttggacgattacgctcgcaacttcggcagcaatcccggctactcgaatagagtttctgtagcaagaactagagactccagcttgagtggattccatgtccccaaccttctgtctattcccacgaatactaataccaacacttctccacagaagtctcacttacgaaaggaattactggaaaactcgattagcaagagtccggtgaaaagagttggtgatagagaatacactaacattcccaacgtctctactcctagcttcagacacgatgtcaccactatcaagctcccaggggacgctgaatctactagctcagaagatgatgaaaaagaccattcttctgaaggcttgatccatcacaactccgagaagtttgccgtgagctacgaaaatgagtcagacaacttgcgtgaaagcagctctcagtcttttgaaagtgttcacaacgatcacagagacagaagcatgaacgaccagtcgcagtctggaagtaggtcgcctttcgatgacaatgatcctcataccattgataccactgctcaaacggcagatcttatagaaggtgttaatactgaaaagaaggatgccagacctaacaaagaactcgagaagcaggttcctaggccggtttctgattatgctgacgatgacgatattgaaggcgatttcgatttctccaccactaacaacacttcccaccaaacggtctacgaagtgactggagacgacctaggcaatatggacaatgactacgaggacgccgaagatgccgaagacgaaggtgaggacgaagaggaggacgaagatgaagtcgaagatgaagattctggtagattacatgttccatccgtcaaacccagaagtagatcacccagaatctctgctttcaacttattgaaaaacgacagcgatgacgagaacgaagatttatcgccagagcagttggaggaaatcaagagaatgaagtcggtgtacaaagtctactttgataaggacaatgaaaacaatggccagttcaaactggaagatcatccattgcctaatatagatttaaagggtcagcgtattaacaaacatttaaatatggataccgactactctaaaagattgactacaacatcatccatatataatgaaaaccccatctatccacacgaagagcagtattactatcagccagaggaaacccagtttcaagaacagtactaccaagatcaagggtatcctgaaccagaggctagaccattgcctccgttgcagaagttgcgtaatgcctcggatattcgtcattctaccttgcaaacatatactgatttccaacctagatctaaaaacgctgcgcaagcaaatagcaagcttccatttaaccccatcgaaaacgatggtgtttggtcgcctcctatgaactcaccaagtttatcgcaatcgtcattttcgttacaacaacagcaaggtggcccatccagtaattatgccgctagtgtagaccaagttcttccatccaacgcaatttcacccaacggtggaataccgtctgccacacaattggccagatcttctgtagtcatgttgaacccggtaacagaaatcacacacaagaaggcgtacaaacctgctggctccttgccttctagtggctcgaacagtaacttcaaccagggcggtcctatggcatacgaaaatagtcagtcgatgctcaacggacctgaaaatgacttgataccaggcaatagaaagagtgatgttagacgtatgatgaacaccaacttctgactcaagagttacgttactatgggatttctatatatttattcacttcgaggggtcattattagcttcattgcgtatacattcaataaatattgtacgaactaacagaactagcgtaggaaaaacagaagaagttttagtactaaacaggcacccgcataactcaatttcgtaccgaattaagggcggaatcgattattaattttatttattgcaaattcgaaaaggaaaactttgccgagcagtaaaacatcaatatcgttcagaaaaaaatcgtaaaaaacagtaaaaaatatttaaaaatgaaataaaggaattaatgattatattaaggcggggggttttctgcccccaaatgccgttacaaacataataagaatcaaaaaatttgcaccgccgtttccttcagttgcaggtagctcatctcgcttgtcttcaacattcacaataaaataattgaaaaaataagcaataaggaaaggttatggaaaatcggagttcacctaaaagctgtacatcaaattttttgcacctatttggattgtcgagataagatctgtgaatctgtccatagccaccttaccccacaagtcgataacgctgagaaaggatatgcaaatggttaaaacttagaggggtttatcacaatctaagcgctaacagaaggtgtgaacgaaggttgtgatggttttgggctttggcagaattggtaagtttgctaacagcaaccttcaacgaagaggtctaaatttttgttcgtggcatttttctgtgagcggcttttttggaaccaaatgccttatgcgcaccgcccaaataggcaacttagtcgcaaaattgcacaaggcttcatgtctcagttgcagttgcctttcaacgatactctatgctatctgaagctcttgcatatcatatactgcagcttctaaagtgtaatcacagattgcttaagactttgctcgggctcttgcgacagatggccctatataaaacgccaatccctcatgaatttaatcagaagacatagctgtagaatcttaagaattggcttatctttgtaacataaagaacaccaggtctcgactacaatgactgcaactgaaaaagaagtcatacccataatctcctttaccgaaaacatttccacctcggaaggaaaaccctctgacattcttgaatatgctggaagtgagtcttccttggaagaagtaattcctaaggatgaaatcaagagaagcttgaaggctagacaaatttccatgattgcaataggtgggagtattggtactggtttattcatctctacaggttcaactcttgctgatgcgggtccagtatcagcccttatatctttcttgttcatgacaacgttagcattttcagttacccaatctttgggagaaatggcaactttaatccccgttgctggatctttcacccaatttgttaccagatggtgctcccctgctctaggtgctgccaatggttggaactattggttctcgtgggccattacttttgccttggaattgtctgttgttggccagattattcagaagtggaccgatgctgttccactcgaagcttggatcagtatcttcttcgttttgttgacagtgttcaaccttttcccagtcaaatactatggtgaagttgagttttggattgcttttatcaaagtgatagcagtatttggttggataatttatgctttcgttatggtctgcggaggtggtgaaacgggtccagttggtttcagatactggaggaatcccggcccttggggacctggtattttggttgaaaacaaaaacacaggcagatttttgggttggttagcttctttgatcagtgctgcatttacattccaaggtaccgagttggttggaatttcagctggagaaagtagcaaccctaggaaaactgtaccatctgctatcagaaaggtcttattcagaattttggtattctacgttttgtgtatgctctttattggattattagtaccatacgatgatccaaagctttctgccaacggaagctacactgcctcttccccattcattgttgctatgcaaaattcaggaactaaggttttgccagatgtcttcaatgctgtagtattgatgacaattgtctcagctggaaattctaacgtttactgcggatcacgtattttgtatggtttagcacaatctggtgttgcacccaaagtttttaagaagaccacaaagcaaggtgtaccatacgtttccgttattttcactgccttgtttggtttattgggattcttggccacttcctctagaggcaatgaagccttcaattggttgttgaacatcattgctacttctggaatgattgcctggggttttatcagttacacacacattagattcatgaatgtgttgaaatccagaaacatcagccgtgactctttgccgttcaaggccaaatttatgcctttcaatgcttactatgctgcaattgctattttcattttggtatttgtccaagggttccaatgtttctttgatttcactgctactggtttcttcaccgcatatgtttcgcttattctttttgttgtgtgtttcatagtgttccacttcgttttcaacggctttggaagaaaatccttcgaatggtcatcattcttggtgcctcttgatgaatgtgatattgatactggagtaagagagatagaagaaatggaatgggaagagaacgagccaacaaatatatggcagaaattctggagctgggtttcgtaaggactacatttttggaactcacatttaatgaatttataatttaaataagtaatgactaattctatttgacgatcatgtttataattaattgacaattgtagataatcaagaacgaagtctttatacactattgggtgcaaaaagatcaacagaaaagaaatgtactttgttcacaaattttacatgttccagaacatttctgcatttcaataaaaagcttcgaagttagagacaatatgaaaaagaattccgagtctgtagtatttatcgttaaggtaattcaggaatgtacatgcttttccatccttttcttcagaaatatgtggtatattcacttagtctctctcatcagcaaccaaaaaagagaactcgcacacaaaatcgagtcacgtgcttttctgaaaaatctctctcgaccaaccagattgcctctctaattctgtgagattatcaacaaaaccgagaacgccataataaaacagtgagaaaaccaattttagctttcacagtataaccagcgccacacacagaagtaagtaccacaggcattgtcgtgtccatttctgaagtgttcaagaccgaattaccctcaagttatagtgttttccgcgattcgaagtagtttcagacttcatttttcagtcgtaatgtgcccaattgaaaaattcaaagaatcagagaatagctaattgaagaacatgaaaatcgttgaaattgctatgaattcatggtttttttgtattgaagaatcagaatttcattttttgaccaaatcccaaaaacaaatattaacaattctagaatatgtctactgaatctcaagttgttccatctggtacttcgcaaaacttattgaacgataagtgggatgttgtcttgtccaacactttgatcaagaccggtttaggtttcggtggaggtgtattggcatccatattgttgttcaagagaagatcattcccagtttggttgggtattggttttggcttgggtagaggctactctgaaggagatgctattttcagatccaaccacggcttgagaactgtgaaagcataaagtagtattgtctacgttaccatatttcctatagccacagcatgtttcacattaagccaacgtaatcatgcctcccatctgatccataatagatacaccgtataattatttattctttgaagttcgtgatttcagaacgaagccagatcttcaagaacatgctattgtcaaaaacaaccgttcactttcattctagatttagcataaacataagttatcttatatatactaaattgttgtgggagatcatttcatggtttaccctttatcttaaaatataaacagtatacgaaatgttgatgaaaaatcagactgtaaagtgtagtctataaagaatggtacctgtagttgatgaaattcaagtaatcccaaactatttgaaagcataaatatgaaaatatataaaggcttcactttcgtttcaattcacggtggatatagaatctcggatatgagccccagatttgagatgttctgcggaaagcttattagagggctattttttgtctactgaaaaatcaaattttcgtaataaccagaattatttactatctgcttgtttatttgtattgccagtatgagtgatgagggtatagagcagatattgaatggggatatagatctatacgagttcctagaagtacagccgtcgaactcaaagcccgagatcagaagacagtacagacgcaaagctttgatatatcatccagataaagaagggggagatgcccataagttcgacttgcttttgaaagcgtacgaaattctcgtcaacgatgagctcaagaaccagtatgaccaaattaaggcaataaagaaacgaaaacagactagtagagagcaattgttgaatttgactagacagttccaggaagaattagagaaagcagagaaactggcacaggacgaattgaactttgtcaatagacgaaagaggcagaatgacttggaaaagttgaaggaagaaggcttgaaacgaagaagaacgctcgaggagaaacttactgcaaagagcacatctaaaactgttacgagaaagtatacttcttttgaagaaataccgatcaaacgtcgcatcacattcgatgacccaacttcaaattccagcacaacaaaccaaaggttgaaaattaaatggaagtataagtctgaactaaaaggtctcataacagaagatgtgatcaagcaaatcatggagatattcggcaaagtgagccatgtacaattattgaaatcaaaggataaacatcccagatatagctacgctttgatcacttacgaaaattccgaagacagtgaaaaagctttactgtacaactacagagaatcggccagactatgggatggaaccaatgtcagaaagctagctagcttactaagagactgtgttattgtagatgaatccaaagaaaaagatgatggaattatagacaaaatcaaagggaatgtcaatttgccagcagatttcaaattgctgagtattcacaaacctaaaatagattcgattttgaataatttcacgttaacccacctagagaatctacaaaaaatgtaaaatccgtatctgactccaatatagtgggagttgatcgtgaagatcatataaggaggcttttaagaatttaatgaataatatacgacctgatagaaaactagatccaggatctaattcaccaccaccaatacaaaatcgagtaggtatagcccgagtttgcactgtagaggtcgaaagcctacaatacaatgaaatagtctatgcaatgtatacgaacggaatctagtcatctctccattttacaaatacttcgtcagttctgaatctctgtgtacagacagtgttccagaggtcgtttgtctgaccggttctgtaactcaacaacccggcatgagctatcattatgccgttatctatacagaatctttcgtcggtggcatagatctggccgtttttcctatcttggatcatcaacttcatcatctcttgtaaccgctcgttggaccctacaccacctacaatcaacacctggttactattcacatgggctaaagcacgttctgtgatttctaccaacatagagtacaagatctcctgaagagagaagcaaagatcctccgcagtaataagttctcctgtttcttcgtctacgagctttttaccctgtttgccaaacatgtccttggccaagccgtctacatgggccaatatcccagacattgacaagtccattccttttacagtataaggtaagttgaccaaatgtttaccctttttggccatttgttcgatgttgtatcctggcgcaggctcgttcggtatcttgagtgttctagcaaatctgtccaaacaattccctatggcgatatcaagcgtttctccaaagattctgtatctctgtttagaatatgcaatcacctgcgtatttccaccactgacatataaaactacggggttgtcggctccggtgatctctcttcccatctcaatgtggcccacgcagtgatttactccaactagaggcaactcccataactgggccaatgtacgagcagcaacaactacactctgtaatggagcacccattccagggccctgggtgaaacaaatacagtcaaggtctgctcccgtgactttggcttcgctcaatgctcttttaataattctcactacccagtttcggtgatgtctggctgtatcccgaggaaggaagccttctcctggaggagtgacatatgtatctctaacattcaggaggacttctgctcggttagtctgcgacaattggcccactggttgtctgataattcccactcctaacttgttggctgaaccttctagtccaagtgcaatataatagtctctaccaggcttcacgtatttatcgagatctactgtcataatggatgaaaaatgatgttgataaattgaaaatccggatactccaagaaggtaatgacgaaggttataagtgcaaagtatcaaggtacttgtaatggaatatgttgtaggttggtagaacgaatattgagaagtgataaataaattctgtgcgaagagctcatagttaagactacatagttaagactacatagttaagaaatgagaatcgaaaattgcgacagcagcagttgcaggaatcagatccgagattcaaacaaacataaacaaacatctacaacttttagaagtcacacttatatattctaatatcattctattcgtagggacaccaaaagtgtttgataaatttacattacaatttccaccatagcagatatctattcagatttaattggaattgtttcatatttgatattggaaatattttagtactcgtttggagagatatacatatattatcaaatatatccaaataacttccatactatccaaaacatctgctatctcctgtttccatcaatagggtgtattttgatattaaactattacgaattactgtcttgatacaagcacaacagaactcatcatactacatttcctacattcaatcttcattatggcatcactcaactattttctcgacagaacagagcaatcaatccgttcaatacaatcacagacgtttgcgtctcctggaatctttaccaatgctgtagtcaaaaagcccaatatcatggcgcttctcaaggatccaacttcagacgaaagatcgctctacaagatcagcaaacccagaatgaagacaacaaaagcaagcacagaaattcgccgcaggaaaagagcagcacttgctgacgaatttatggaaattaagcccgaaagagtggatggcaaatctacatatgtagatcgtagtttttatggagtggataatgcagctgaaaccaatgaagagaaagaagaagttgtaaaacgcaccgttgttcaactaccagaattgagttacgattttccagccataaataagaatgtaactcattccaatgttccttcttctcctaccaaaagtggtattcctacttcaaacgcttattttgcgttgctgtcgcctgaagaagctgatcctagtaaattgatagaccaggttttgactttacttcagaagtaccctacattgattgtcaatcaggagggtatcatggagaagttgaatgctcatcaaactgactatgtgcaattgcaagaacaaatcaaccagttggagaatgaaattgaaacacaaaagaaacaattgaacatcttgaatatcaactataatgacatcacgagtcccattcgctcagagtccagtggacacatgagaacacgcgagagttttgaagacgaaatcgatattgatgagtatatagccaaggaagagcaggagatagaggagctcgaaaaccagctaaatgagagacagaaaatatagaaatcaagtaatgactaacgaagattaagaatagaaatatatcgcaattagaagcagtattagtgtacagtcgcttcatattaatttgaattaatgatagtaggtctagctgcacttgttagatagttacaaacaacgagaggcaccgtaattggcattctcttcttctacatttaaattggttgaatccaatattattgctattatacattatatataagttaaactcattttcccaacagaagcatcatgaaatggtcgcccacacacaacacattaagtcttcaaataacttaagcaatagaagtaaggatgtcagagtcaccagcgtccaaaacagacaaggtaccgactctgaacaacttaccacagacagtacccaattcgttgttaccaccttggaagtagtagactggggtcttggacaacatggcgtagtattccaattcagactttctcaaaactggagtgttaccagcaatgatgaccaacttggccttaccagttctcaaggacttgacaacggacttgtaaccaagggtgtacttaccagacttgataactaaacctaacttggcgttaatgttttcttggttcttagattttggggcctgaagatgttagtatgaagcctaagggctgtgtgatgtgctgaatcgttatagtcattatggtattacattaatgtttcataaagtataagtgcctttcatttctgaaagttcactcgactagtggttcgtggcagacatcgttaaaatagtatacggaccatctctgcgtttataatatttacactccggtcttgaggtgattgtagaagaagtagaagagatggagatataaattatgcaagcagtttaaacgagtgaagagtagcaaaatttttcagatttctgtgtgcaggtacagtctctatggtgattcctctaaaggtttcagttgacttaactatggccgtagcgagtttttcgtaaagtatgagaaaggaaaaatgcgcactaaaaaatgcagtcacagtaccacgtgacatacgcctgacttattaactgtacttcctctcaatgacctgcatatcatacacgaattaactatgagattttcatttttcatacttcgcggcctccatagttaacgctgtagccctggctgacttcgcactaaatgctgattctgcctaacttaactatgtgcctgcagatagtcttctcaccttcagactttgcccactatgggcgattctggattagaaaaattttagtagatttttttctaatatatgtgtagaacgtcttcatagtaaccaataataggtatgttaacataggtgataactcgtttgagaagaggatacaaagcatataagagccctccaacagcagcagaacgtaagtccaagtcaggcatggcccgaatgttcgtttaaaaccactgaaatatgttcttatagacatgaaattattgctggaaaaagtgaaaaatctgaaaattctctgtaatcaacagtcacaaattcgacagccaagttgaagaagttattattatcatatgcaattcagtcgtcaacgtgtagttttgttgaagttcccaaattactagaagaagattgaagaagtaacagtcagaagcccatatacatcaatatcctagcaatgtattctcaaccaacgatgatttaattaaaatacacagcaagaatactaacaaatgtttctagttaataaaaatgaaggttgaagttgactccttttccggttccaagatctacccaggtagaggtaccttgttcgttagaggtgactctaaggttttcagatttcaatcctcgaagtctgcttccttgttccaccaaagaaagaacccaagaagaatctcttggactgttttgtacagaagacaacacaagaagggtatttctgaagaaacttctaagagaagaagcagaaagaccatcaagcaccaaagagccattgtcggtgcttctttagaattgatcaaggaaagaagaaacttaaaggactctgacagaaaggctgccagagacaacaagttggccaaggacaaggaagccaagaaggttgccaaggctgccagaaaggctgaaaaggccaagttggctgctgccggcggtaacatcgtctccaagcaacaatccaagggtgctttccaaaaagttcacgccacttcccgttaagtaaattaaacgaataatttatcttcactccgtgtacatttattaattggtttggtagcttttgttatatatcaatataaactcttctaagaatgcgatgtattaatgtaactactcggtattatcatgaactgacaatgtctgcttcatgggtcgcccgtactactaatatcaattgtattgtacatgctttggcaaactgtattgagaatactacgaaataattaaataagctatgctatgtactgtggtatgactatactatgaattcaccataagaatatacttgaccaatcttatcaatagaagtaagtctacttagcacaatattgggctccccgtcactcttattaatgaacccgaagtagaaactttctgtagaatgacagtaaacaattcttgttcttgaactctgccgatgtcgtacacttacaattgctcccaagtacggctcaggttgctctttgcaagagttaagttcgtactttctagtgtgtttcttgataatgtccaccaacaaagccccatagtctaattcgtcatccaattcttcttcttcttttgattcttttaatgtctctaacttagtaaggatttgggtcgaaacataattggcaagtagtaacgtaatcacatcttcaccatttccactacacatgcagcatacttcatagctatctgaattctttaagtctatggcagctccgactacgccagcacagccaattctaccaggtagcttgaagaagtttccgccagatgaagatgagattttggttattccatcttctggagctatttcaactatacctattgtatccgaaatagcatcaactgaatcttgtaccaggataccactagcaaatatgttggctctatagagctcccaagttcttcgagctctgttcagaaccaagtttcttgtggatttgccaagatgaacaatttctaaaggcttatgtttattgatttctctgtcaacaaaatcaattgacttttcagcactctcatagtgtaaggatgtcggacaacttaatcctgagcttgtcctgctataagtttcttctaggttgtcataaagtttccaggtttcggctattggattctctacgctaattccaacaattgatcgacttcgtatctttccagatttatagtggataaaactggcatcacattctacctttccttctaatgtaagcgatgacccaaagccagtatttgtccatttggaaatctctagcaatcttgaagattccaaaaacccatcacacaatagtgcctgtttgatgagatgtctgtgatggcttttgtttgtgacagaatggtttccagcaccaatatgaactatcctaattacatcgctcatgtccgacttcaactactctcaattcatgtcaagtagtatttcgcagggtacatggatgaaatggaaattcgcactgcactttgaatggaaagacacgcaatggaacttgtacagatgaacttctttattgaacacagctagtgtaaaaaagaagaaccactaacaacatatgatacttgacggaacaaaaagaatggtccctagcaggatcgaactgctgatcttggcgttattagcaccacgccttaaccaactgggccaagggacctcttcttgttgacgaaaaaatgcgaagtaaattttgaacatttatttagtcacgtgattttaatcacgtttataatataccgttgtcaagttttctacagttttctaaggatatcacctagtttttaggtaatatcattcggaggtttttatcctatgatttcctccaccattcggcgtggattagaggatgatttatatacttcacaaaatcatgaaggaggaactcgctctctttgaacaagactcgatccccttggtgagcacctcaatcaagaacagcctactgggaccagcctctacccgaagacattcaacggatcccaggtttcgaaggactagatcttcggacatcggatcataaatatcttggggtaccgatcaatgatttcaatcaggaaacttatagcaagtccctttctattcaacttactattcatagctttaaagaattgccgattcacctcggatgcaaaggttttaacatgcaagtatccgatatctaaagacacatcaaaatggttaagggtcacttaccctcaattggtgaacagaatctatacaattaaagtcaagggggttttggtctccttgacatggaacagcaaccgtcgtgccaaactgttctatgaaactttggccatcctgactgattggaatttaatagtgtatcgcaataaattacaatcttccatggacctcaagtttccacctcgcatggtcaaccaaactcgatggtcataagactaacatacgtaccaatatacgtttgctgaattttgtattgcaaatatgtctagtaataaatatgctatggtaggaatagatgacttagtcaatgtaatggctattcaatttgtgaatctcactgcacaaaacctcccaattatatatccgacccttcctatcaccattggaatcatgcctaattcccaagaagtgttcaaagatatataattcatagaatagtcttaagtttggttgaatgattatgttgaacctctgaactctaaggtacatgtagcaagaaagcaaattcaacctaaactttctcatcatggaagccaaaacaatagaggcggaacgagagacaccaattcgacagtgaattaatgttgtacctggtgctgtttctttgctttcagtgaggagaaatttagactgtatgtgatccggacaattagtcaaaagatcaagtatggaatccttaccatcatcttttagattgtgaatgaacactaacgatttcaaatactttggaaaattgtgtccataataggtaagttttctcttgtctaaattagaaaaatctacctcatatatgtgacattcattatcgttgaacaggtaaatgggggacaacacttgaactccacttctgtacctgttccttacttcataatcaaagataacctgatttttgaaatgactgaaccagctaggacattcaccaatggaaattatatttgtaattttggtagaatttagaatggttgtggaattagcatgttgtagtgaaccaagatataggttatcaaatattcttgatgggaagttgttatcgacaagaggattgaaccaatctgtcttcgatggtgtttgcataggatgaatgagatgataggaattcatctcatggaaatctaaagaattgatatagccaggcaaatctaatagcttgttcttaagatagtcaattattctttcaaaatgtttgaggaatgtaagatctgacttgaagtaatacaatctcatacttgtatgcataggtttgcctttgttctctaacaattcttgaatcgaatcctctgtattcttggctccaagtaattgagcgatgcaaattgctaatagcgagagcccagtaaagccatcgaaagagaaaatgaacaccttgagatcatatttgaacacaaccatgtagatcaacttcaatacattcaaaaatgctgtgatatctggaactgtaatagcgtttgcattgaaacaccctgatgaagggaactccaagtagtagacacttgcagaatttggctttgctaagtctgacatgatagctgaaagcatcttcatcgaaggtagacttgcattctcgtggcagctgatgatcaatttgaatggattgcaccctgacgcggaaattctgttgaaatctgttatattccctagacaaattttgtgattgtgcatccatttcatggagtttagcttccaaattaaattctgctcaaatttcaagaacttgcaggcatacgtttcatccgtaaatctcgaaggaacatcctccaattcagatggaactaactcgttcaggtagattattccgtcagtcaagtcattatcgaagtactcttgacttatacgggtccaatcaatatccttatcaacaacgtatataacctgtctcttgttttcgtttctcaaagtgttgagtagtattgccaaggtcaatgattcttctctgttgtaattatagagaacaaaactggacaatggagccatcaatttgatttgctccttgtagttacggttgttcaacccagtctgattcttcataatatctatgcgccatacatgatccaaacgatggaaatcttcgtacgcaatttcgttgtggactagactcacgtcttcaatctgttgtacttctgttgacgaatgaacgaagtgctcaaactttgctgtagaaaccttcggcaccaatatgtcttctaatccgactgtattggccaaatcaggaaatgaacattttccctttgcagtattaatgaacatcaaattgatcaagttgttatcttctagtacttcggtgatatcatccacattctgatcatttccttcgaggaaaaacgctctttggttgataccatcaagaccatgcaaatagggaaacaacttgagcgagctctttaagtggtcgtagtagtgatcatcttgaaagcgttcgtggtaataatagtgaagcaactcattgagatcctcggcactggagatccttttgatggtcggatagtttacggactcgagctttgcgtcgaactcttccatccaagtcaagttcatttcttccctggagcccgttccctgagaagcaaagttggacaagtcttcggacgacgaagctgaaacattatcaccgtactctggagagagacagctacatttgcgactaactgacagcaaattgtgtgatgagtggtggtagtgaatcgtggaggtcaagtgcagctttttattagccaggagagaaggtgcatgggtgcaatttgtgtctcggcattccgcgctgttgtggaagacgcaaaactggtcagtggtagcagtagaagttgtgatggcagaagtagcactagccgtggaacatatacacgaacgtggtacaattgagtgtttgtttattaggtattggttgttctggcccggttggaaaatttcaaattccgaattgtggggcgactcgtcctcagttctacgagtaacaggacggggcagcgactttcccggtggattggcaagaagtttggtggtgttaacggcattctctatcaaactcataactcttgttgggagtgaaacgtaagtatgaaagactggggcgaagtacgtccgttatatttatactatatttatttaaaagacgttaaatggaggttgcggttcgcttaaatggagggagacaatttttcaggacgacttaagtccagaatagcaatgccgccttgttgtaaggaagtatgagtacgacacaggcaccctacaatagtagaggaaaaaatgagccaacatgtcggcacaccccaggtatatatagtacgtactcactctgtgaacgccatttcaaaaactatttcatgttgcagcgtaaacttccgggaaatggccccgtagggggggcacggtttcaattgaatggctgctctactgttccaaagccgaatctggtgcgggttctagctggagtcttgactatggccaagtacggatcaattattgttagaagccagaccgcagatcgaaatacatgcgcttgcgtctccgtattgtttcgtgcatgcagcgaacccagattgcaggacgtttaatgtttcacttcagcgtttctggatccgttggccgatcaccactcgaagggatacccgtaactgataagccatgcggatacaatgcaaataatattggcaacggataactaaagctagaaggctatctacctaaacgtatctccgtgtgttacttgggggctcttttggttccttcagctcgattccattattggagcaaagtttcaggactagactcagcgcaaaaaataaagggcagccagtctagattccagccgacaggtggctgaaaccatacaggcctccatgcccaatctgctaggaccgtttctagttgtcgagttattcaattatacatacagtttcccagatccacatattaagcatacgaatcttatgcattagacatacgaatctttgcacggcttgccctggcccttggctgtgtatcgaatctacggagactcccaaagtgcactgggttctatggtgaaatattctcttggaatccatcggtttgaagatcggccatcctgtgatactagaaacgtcaactacgcagattgtgaaatcacctccggctgtaagccttgcctaggtggaccggctgttacttctaccgacgtgcgctactcaggttgacatatttttcgtagttgttagggcatatgatttctggacagtccatttatagattgcgcaacgaaagtcgacgttgtagtttcaggcagtgagccttcctcccagtttctgccactgaggcatttttgtcaattggaagtacaagggtgctattcgttctgagcaagcgaatgatgtcatttgcatagcctgaaattgccgctttttgggctttaaagaaacattatgaaactggccgggacgagcttggaaaactgcacgattgtactttggcgcttcccacaacgtttcaaactgtgtagagtggcattatctctggaggaagtacgaaaactgcggttgctcacacttcccaattgggccgagtgcgatattgtcctgttgcagccaataatgtagttcttcaacagctttgccgcctaagtacgatccaccatagcagatgcagctccttacagactgtttcatatccccgattcatagatagtcgcttaagtgtgataacaacccttttttgtcagaggggctgcaaattcgaaaataccgcaatgaaacctactacaatatttttagagttggctcttattcatggaatagtagcgtctgctgctgctggggtcaagggattgttatcgctatctctcttctcaaactcaacgcaatgtgcctggaaagaagtagccggaacacagtcgcatgtgttaatttgtaacacaacgtaccatgcttctggaacagcggcaaatggtacttttccatgggcttctgcaaaagacttcttgaatatcccctctcattttgttttggaggctccaggaaacacaatagaggatgctgaagaaccagattgtgaaacagagcttgaagatgatgacgtcgatgaagacgaaggtaatagcggcggtattgagagtagtgaagtagaggaggatcttgaagatgaagaagaggaagttgaggaagaggaagatgagaaaatggaagacgaaactgaaagtgaatatgaagagctagatgatacagatgaagaggataatggcgaatttcatcacacatatatcaatggaaccacttcgagatacaattggaaaatctcttctaccaacactctcccaacggctacttactcacacataacttcaagtccatcaaaccatttcaccttaacatacgacttcccaagcaagtcatcacgaaaaagcaacgaatttctctttgaagatgatggccacttccgtattggatttggcagaacaaccacagggacaacactctttcctcgcataacgcttgttgatgacggtacaacctcatatgtaattgagcctccagtaatctctacatccacgagtgtcgcaagcgatataccaaaacaaccaattacagaggataattcagtaactagttacatggaaaggacttctcctgaaagcacagaaagttttattacactggagaatctggagagtctttttactacgtttaaatccccttggcaacattatacaactacaagaaatgacctcctcacatggccgaaaactacgtcgacacccacaactattggaatcattcccagttccacccgaacctctagcaatcctgctcttcttgaagggagcgttttaacttcttctaaaatgcgtacagtttcaataagctcttcgcaaattgcgagacccattaaggcaatctctaaacatactggacattctacaataacttcaaaaagaatcagagatacatcaaccacatctagtacaactagctccaagcctcactccattaaacagactaaagcaaataagtatatcactagttcacttccttctacgctagtcagtgctaacaagactgccctaaatttcaccaagagctttgggggtgtaatctacaacaacagaaccatcaactacttttcagcttctaggggaatagagatctcctggatgcttgcacctatccttatattgttttttataatgagtttatagcgattgcaaatgccatacttataaagaaataatgtagtgcgcactctttatttctactgatagattttgcctttaatattaaacaatctcaaactacaagaagtattgcaaaaatacaaaattgctaatttatttcctaacatttattcacatcatagcaagaattagcaatctacaatcctctgcgatgtctacgttgccatcgtcatggacgcagtttcaattgtttgattatactccaattcgtgatcctaatttccaaacaaacgattccttatactccgacgccagtcttctggccatccatgctaccaactcatatttagtcattgctaccaataatgcatttctaaagattatagccagtaaaaatctccaacttctcaaaacgttcattgcgtacgatttggattatagaattagtttcgtacgtagtttacccaactcggatttattaatcaccttggccgaaaaacaaggttcaccatcaattgtcaagctatgggacttgaacagaattatccatctccaagaagaggaccaagacgtactaaaattcaaatttcaaactcaggctctcgtaactaatgcagacaactcttaccctatcagttcctttgagttcagcagcgatcttacttgtatcgccatagggtacaccaatggaaaagtgatattgataaggggagacttgctaagagatagaggatccaaacagcgtttgatctacgagtcaacagatccagtcacaaacatagcattcaacaaatatgaggacttattgtatataacgactacttccaagattctaacagtactgacctcgggcagaaaccagagaaaaccacagagaatcttgtccaacaaaacaggaatcgatttgaattgctctgtaattgatcctaagagtcaatacttgattgttggaacaactgattctatccgctactacagtcacttgaacaaaatcaggacaatcaaattcgagattcccaaatctagaatctttcgttttggcaagaattaccttcttattgtttctccacaccagcaggaacttttagcccaggaatcgatttcgaagaaaaagaagtcgtttgccagagtattgattctagatatctttaacaagcatatttcatttaatttcatgatccccgataatactatcaaccatgtgtttgtgatgcagaatgacgttcacttactttctaatgatggtgttctttataagttgcacgaaaaaccaatcaatcaacaaattgagtccataatacagagagaattgtttccagtggcttacaatcttgctgtacaggcaagcatgccaaacgatttattattgagaatccaaaagttgtatggtgatttcctatatgagaaacaagaaaatgaggcatcaattgatatctatattaagtgcttggacttgtttgaaaagctggtggattctcagggtgaatctgtagaccaagaggacgacttggatgacttcgttatgaccgttattacaaagttcaaggacgctgctaatattccaaacttaacaaagtttcttttcaaattgtacgaattgaaagaagctaacaatgatcacatcacattacttttgtgttgctactgtaaattgaaaatgacagaagagttagataaatttatcaacgacttggatttagatgaggacaacaatttgcaagatttgaacttccagttgatcataaacttgttcaaagaatgtggatacttcactcaggtaataaggttgttgtttcgcttgaatcaacctaacttgatagtaggtattcagcttaacgatctcaaacaacctagaaactctttgaactatataaagtcattgccaattgatgagcttttgcttatattgactgaacattcaaagacattcctcgacgattgtcctattgaaacaacagaattgcttattaatgtatttacaggaaagtacattccaaatggagatcatacagaaccatttagtgccgagattctgtccaaaaaagaggaaaaatccgaagaaactgaagcaccttctactttgaataactatagagcttttctcaactatttgtcaggcaactcaactgatgatattaaatcaaacaactcaaatgaattaagtgttgaaattcaggaacctacttatctaccacccagacctagtttaatttttccaagcttcatcaatcatccaaatcagtttgtgatcttcttggaggcatgtattgaatcttttgacaaatatcaaggtaacatgaatgataagaaggacctattgatcacacttttggagatgtatctttcattgtctaaagaatcaaagaccaattccgccgaggaagagtggaagaacaaagctagaatcttactacaggaaaattcatccctcttgaacaattcgtcgcttcttcttctatccaacatttatgatttccaagaaggagaagcattagcaaaagaaaaagcaggacatgaagaaagtctccttcattcgtatcaactttcaggcgatatttctggttgtttcgatttgctacgaaagtatggcgaaaaaaagcctgagatgtataagctcatgttgaagtttgttgtttccaagaaagagatttttgaaagaatcaatccattggaatttcgtttcctcttcgatacaataagctcaagaaagttgatgaatccgctcgaaattttacaaatattgactgaaaatccagctaacgactttatcacactcggacttatcaaagattatttgatcgattatttcgacaaccagaataaagaaatcagtaacaatacgaagttgataggattttatgaaggagaatcaaccaagagttctcacaagttgacggaattgactaacaagccatttgtcattcagaacaacaaatgttcggcctgtgataacaagcttgatttccctgtaattcacttcaggtgtaaacactcttatcatcagaaatgtcttactgactacgttatcgcatcggtacaggaggatatgtctggagaaagaagatgtcctaaatgtgtcaatgaaatagaagagatcaaggctattagagctggacaattcaaatccaaggaaaacctcgaattgtttgaaggaactttgaacgaaactcaagataagtttagatatataagcgaatacttggggaagggtgttatggagaacgaatctgtggttctctttaatgaataactactattactataatatatggaacagaaatgggcatgaaaactaagccgtgattcaagaagaagcaaatgtagatcaatatgatatgtgaattactatattaaccaaacagggttgttggtaatgtaggttatggtaacacagcggaaatggatatggctgcaaatgagataactgccgttaccaatttctataattaggcgttcaagtaatgcaatttttcagacagaccactgcgactgttcagagtatgtgaaattatgcaaaaaggaagaagccactgtggccattctactcagctacgtgttgatgccaacaatggctgatgagtacgtttcatctttagaagttttaacaaaattgaaacacccaaatgtgggtccattgatgaggctccacaaaaaaacgaacacctgtcgttggcagatctacagagttgaggtatgtggcaagacatggaaagagcgagaagcattgagaaagctatagaaacgcgttgcactctacaactgcgagtaagatcctgtagatggctcccgccccaaagatcgcaaccatggaggatggcaaagagaaaaccacgctacaatgcggtccacttgactcagtcgataaatcagtcttgtgacaaaatcaaagtgacgagggtttctcgcaaaatggggaaacgattctcacacttattcgcgttcgacacaggaaagaaaaattttatacatatctaggaaccgctgcctccttcaattatcagggagtcttttttccttatcaattcatcttgaaccgagttgaaaccagacccattgatacatccctatcgactccgacgcctgtctcgacctctagccgaaacagaatctgccgcttgtttgaatcactcaactaaacatcccatccccaacccttaactactgacagtcctaggtttctgacatagttaactcccacccgtgaaataatctaaatcttcactatctttcccccccctggattcgccctccgcttcttaattgcaacacatcaaatttttcctacaacaatgtctactactacacctgttgccaacgaatgtgctacctgctccttgttgacctggaaggatcctatcttcactggtaaagtttttggaggtattgttgcctctttgttcgtattcaaatacgtcaacttgattaaccacgtcttccactttgcctacattgccttattgggtacgtattttttgatatatttagaacttcagatccatcctgaagtgttcatttcgtcgcctacttgctttagttgcaattgtccattctgccattcccattggtggccattccatcctttttttgtagtcgcactatcgcatcttgatccacacttttcaacctctgaaaagtctacacaaaatacatcaaatttcatttatgtgttggactaagattttcaaccgattatacgacaatcattgagcatctccacaattgttgctgtggttagcgagtcgttgatcatccataatagtgcgataatgaataatttacaatggctgaaggcttgaaatatgaacaaatttctattctatgctctcttactaacattaatagtctctgctgctgccgaatacgccggtaagttggtcacaggccaaggcttcgtcaccaagtacaagccagctgtcaagtcgtatgctaagaaggtcaatgactccgtcttaccccaactcgccgagttaaacttgaagatcgaagaagaattccaaaagattgtttactcccacgacgtggaaaccaccttgaaggctgctggtctttcttacattttgtataagcttacttcctggttctctttgttcaccttgcttgccactgctgttgtcattgttttcactgtcccagtaatctaccaaaagaacaagaaggaaattgacgcccttgtagcccaatactccaagttagccaaggacaagtcggctgaatacactaaggctgcccataaggctgctgctccacatatcgagactcttgtcaacaagaccggtccagttggtaacttcatcaagtccaaattccctaccagaactgctggttccactgttggcgaaaacagagatgcttcgtttggaactgctgctgacgaaatctcgtccgctaccacttctggtgcctccaaattcccagatgtcccaagcactttgtctgaaggcaagagtcaagtagaagaattcgtggattcagcccaagaagccaagtcagaattcaacttctaagttgtttgctgacttttaagctcttgtcatacaaggctgagtatgctagtctggcatatgtagttgacatttgcaactcatagcgaaattggtcccttgttttgtactcctgttcggtaactaggttcatgtattgctatgtacttcaattcatcgatgtttgttatattgaaattgatattgatccctttttatagcacttggacttatcttattatatttattttagttgtactaatttaatattgtagctattttacattgactatagaaacattctacacacattcctctggattaggcaatcgtctgtagcatgctatccattttgaacccttgtttcttgtgactttctgaccttcttcggtggaattgaacatgatagaaacacaggtatcctgttcttcccattctttgctcaatctttcaaaaagtggatgttcttctaaatgcttaaccatccagttgtgcaagtcttcaacgtcagtaatggtatacaccactcctccttccttcaacacatatgcatattccgataacaaggtgtttgtgatgattctggccttgtgcttacgctgtttgaaatgaggatcagggaagcaaaagaacatcttggacaattgacccttgcggaagaagttgggcaagaacttcatggcatttccacgcaacacggcgatattctgaaagttgacatcttcatcttcatgcttgtttctcaatgcaataatacggtcttccacgtactgggtgacttgcactctgatttccattcccaaaatcaacgaattgggaaactctggtgccaatttcgtcaataaccctccgtaaccgcagcctacatctgcgatctctactgaggaagtcatctgcttcgtttcctcgtcgtagaatcctgggaacaacttttcccagttcatgtcgtctggagatctaggatactccaatctgtggtcggaaaaagggttggaatgtgctctttgtctgtagtatctctttcttggtaacgatattttgtcggatgtagactcttctggagttggcgatgcctcgaaatgagcttttttgtgctttttccttgtttcttccttcacatctctgtaagttcttcttttgctttctgcttcctgctgttcccttaattgggtttctctgtccttgatcacttgcacttggtgaggttttggcattgcggtggtatttggctttctctacgaagaagtaagctaagatgagactgagatttttcagagatgcaaaaactttttttaaagtgcagttcagtgttgcgtaaatctttagtatggaacaagatacgaaactgataatgactcttcataacacaaatcaaggagaacataatgtggctgtttcatgaagatcaaaccatgataattaaaattagaaattacgtgttaatacccacttctttaccagcatttcgctttttgatagactgatacatctatattatggtctatttacagaatgttactattcaaggtatatgcacattacttttgggggacttatgccctacagagactcttcttcgctcttttcgcttggatcgaggtccttaagacgttgctccatcgtcaagtataacaccgaggaagctgtttccaaagttctgacgaggccagcacctcccaagatagtaagcaaaccagctaattgggcctgtaattgttctttgttgggcaagtccttgaacttgttgatttcaactacgtcgaaaactgaagactcgaccctagcaccaatcaagatcaacttatcctgggcattctttataactttcaaaacatcattgactacggatggctcacacttggggatagtgatcacggcagtaggcccattcaacaacggtgacaacggatgtttcacgccacggttcttgttggtaactccagcagctgctggatcactttcgtgttctgatttcaagtagacgttgtagatactgtttctaatgacattcaattgtgctccagccttcttcaagtcggatctgaccttcttgttgtctgcttttgcgacattattgtgatgtacaaacaacacaatgtcattgctgtcgtttaaatgcttgtagtagtccatcaagaaggtctttctggagaacaatgccttttctgtgtttctctgttcgaacagatcatattgctgtggttgacttgtcgtgctgtagaaggcagaaactggcgaaattccacgaaaattcttaccgagacttggcagcaccgttctatatatgcctgctcttattcctcccaaaatactcgtcttcaagctcatattggttcttctggtctctgcagattctagcagttctagagcttttacctggacatctaaatttttcagactggtgaaaatgcgagccacacgacttctgatcacatgagcttaactatggtcgttgacgagattaaggcaaagggccagagcaatgaaggttttgatagctgtaaatgaaccagttggagcatatattcaagcacgtagcattcaaatattatgtgttatcatttctaactatttttgaatatgtggagatctcttatttatgagaagtttgatttatccgcaaatagggcccgaaaagtctgaagttgtcgaagtttttagttgataagtaaaacatatcaacaattccaataacttaaatgtatattcaatcatctcttctgcttttgaagtcatacttttagattcttcctggtagcccattcacaagctttaacaattgcagttgcaaatttctccggtgtatgcgcacgacctgaaaatagcgactttgaaaaatctccataattttaagatttgtagagaaaatagtagcgtttattccttgttctttggaactctatgtcacaattcgggagtttagaaggatttctaaattcgcttacccaggtcgactccgaacgtacggacgtggttactgatcacggtgggaaagcgagtgatgaagtcaatcatagcccagcagaagatgcttccaattccaaatccaaacgggagtatgggtacacggggtctttacttccgaaacgccccaaattggactcgccttcagtgccccctattggatttgtggatcttcagaaacttgagtatgcaaccaagacacttcagaagaatgtgagacttatagtcacagaatctccagatattgacagcattgaaaaactcctcaactcttcgactcttgactctggagctaaagtcgatttgaaaaataataactacattaaagtggcttcgagattgaagtcgaaatacaagattggaaagttacccatctttgatgaaatcacagctggtgatatcaaaatttcagacgaagaatttgacaaaattgcacaattaaacgattgcagcgattccgaagagtctcctacctatttgccggtagattcaagttccactcaagaaaagcgagtcttcactactggaatagataacaagcatccaccgttaccctttatcaaggaccaaacgttgtatgagagagtatttgttcacaagtctgttgtcaatggcaagacatatttggatcaaaacgatttgatcaacagccacaacgagagactcgaatttctaggcgattcggtcttaaataacttggtgaccttgatcatctacgacaagttcccaagtgcctcagaaggaaagttgaccaaaatgaggtcgcagttgatagataaccatacattgactcagttttccttcgaatacggatttgacaagagattaaaaacaaaaactgacgaggagatcctcaaaactggagaccagaaagtgtatgcagatatctttgaagcatacattggagccctctctgtagaaagaggattggatcttcgggaaatcaaggactggttggaaaagttgtatgcaccaaaacttgaagctttcaaagttaatttccttcaagaatctgtcaacaaggaggcaaaatccgaattgtactccatcgttggaactgcatcatctcatccgctatatgtagttgtagaggaaggaaatggctcccatgattttgtcgtagaatgtagaatgggaaatgacgttctaggcagagcaaaggctccttctcaaaaggaggctggtttgagagccgccatggatgccttaaaaaatcgccaattgctagaaaagtactacaagatcagattggaaatcgatagaaaagactccgtcaaatcgtcgaagtcgaagagatcaagagaagaagatgaagattctgattattcaatgaggactccgactccttcttctcctatcaagacgattatgtttcctcttgtagcgtcagctgacgcacctattgataacaatgctaaaaataagttgtatgctgaaattggtaaaagattgggagaggttccacagtacatagtttccagggccaataatgatatagccgctgtttctttgagtataagaggtctagttgttgctacagctacagataaatcgaagaagaaggctatggccagagcagccatggcaatacttgaaaacagctctgcattgaatgagatttgtaagggaaccatatgacactatggtatatgttctatcttcaggtaacttattgaataggaatttaaatagtctagtatatgattaagctaattgatgatgtttgcaggtgtctactatcatattattttatccgatgtagtcaacgtttttggttacccaccaataatatttcgcagccagactaagaatcacagtgcagccactatgactcgctactgcccaaaattggagcgaacttgtttatcaagcactatacataatactttacttctagaaacaatactgtcgggtcgtgatgttctaagtttcttacactacgacttttgaatcacatttccacagtctaattcaatattttctcactacatcaacagtagaactgtccatgcaattgaaattcagttgagtcctatctgtaggaaaccaatggctgggtggaatctaccaaccctattcagaatgtgtctatacactcaatggaaggaattagaagtatatcaccaggaaatagtaaaccccggtgatttcggaagcatatatgtacctcaaattcttgactatccagagactcaaaattgctattatatgcttgtcgtattgaattcaagagatagatacgaggaaggagatgtctgaacaaacttcatggacaccctaatactcagaaaaaagtgtacagtttcttccgttccaactatatcttgctactttcacagtatctcaggattcaatcagaatacatttgtcgtcaagacaatcttcacagcagtctcatgtgtgcaaatctctactcttaaccgacttatggctatcataaaaaaaattgggtgcaaaatttctaattccaatacagaaaaaaatggacgagtccggagtcgaaccggagacctttcgcatgctaagcgaacgcgctaccaactacgccacacgccctaagaatttggaggagaaatggtccctagcaggatcgaactgctgatcttggcgttattagcaccacgccttaaccaactgggccaagggaccttttcttgaacaacaaatatgttgacattcactggatgtgtttaaaatcacgtgatatatatcacgtgaaaatcacatttcgtcaaaaaaaaccgtgaattcatctaaatcatctataatatagccgtaatctctaaaggaagaacctatatggtatctcagtggagaatatgctccaaataaagctttcaaatagccaaaaccacaggattttaaaagaaattcgcacgatcatgttgcactcaaagacttgatggacctgcaaggcgagtccagagctctagaggtgccagtgaacaatgtgatcagagctacttttctagacgtcaatgtcaactcatcttgaagtaccggcttagctgccagataattcgaccaacggcctggatgttcggaatcagacttgaaacccactaagttttaaaatttcaaaaacttcacgtgacatataaagtacaggacatggaaatggctgcaaatgatgataatgaattactttcttaaactccactaaaagctgaacaaatctattagaacaagaagattctctttttatatacaaatttcggagatcgaagaacatagaaaactcacaaaacctaaaaatttctaaaaaattacaaaacactaaaatattgggctcaaaaagtggagaaacagataactagattcttcccacttttgggaacttccaaaattcatcaaaattatgaccgactaccaactacatttcaataagctttccagcgataatctaaaaaaaggtccatcaacgagccaacttcaaaacattgttcaaaaactctttggctattcaacaaatagcaacaactaggaatgaacaatacctatatatgctcgaaagcttatttcagggatttccatggaaccgtttcatcagtagacattgtcactaaccctccattagtgttcagaatatctacaatttaaaagtgagcgtggctacattgacatgaacatacgaagcttttaccaacctgactgattggaatctagcattgttctgagataagctacaatcagagagttggaactacctatttactcaacgaaagatcaacaaatataagcgggaagtagatggtaaacactgaacatgcctccatatacgtatgcactgattacctgaggtatgcaaaatttacctccggtatcataccaatgtctctcaacccttcactcagtatagaacatggttagaaacccaccaaatagcgtcagaataaagattgtttcaattcatctaagataaccgacttggcatttccttgagcaagtcaggtatgtctaaaccttgcaagtactttcatatcacctggtcattaatttaacgttgggtttcctccagacttatggtatgctagaatgtatttattatgtagtaagtttaatagcaatacatgagtataaaccaaaaggttgtcaccccttacatgtgcgcactgcttcacttagatataatctggttgatatatactgaaattggaacgtaaatcgaagaataataggcagaggatagcttcaatctgttctaaaccttctattataggagtacattttgctatcatttgagactatattgagagagaggagttttggcagataaagaaaacttcaaccatgaactcccagattaacgaaactaagaaatacaacagaagatttttattcaagtcttgtatctttaggatagatgagagattgaactaaaatatttgagatccttttgcaggatcagaatgtcaaaagcaggattcaatctacttcaaaaaaaaaaatacggcttcattacaaactaagattcaatgaacgtcctcagtggattaattttcttttcacttcatctcctattgaagcaacaaaagaccaaacgttgatttcccaagggggtcatattcttgaatatggttgcaaggttgtgtgccttgatagaagaagatccgcagtctcactttgcgtgcaccctagaaaaacacgaattgttctcttatcaaggagaagtaacaaacaacaaacattctattaataatacgattgtctcttgaacaagaacgccgtaatcaagtggattacagtggtaacgaaatccaacttcatctttgtaagcaaaacgatttgtcgaatctaatctccatattctagattctaattattccaacttcaataatcaatctgtaggtgattgaactcatgtactcatattgaaactcatagccatgtccaatagaaaggattccaactcttccacgaaacaaggtatacaatttcctgaggtcagcatggtgccaattatggatatacagaaaccgttatcgcctcggtttggcatttccaattcaacaggttcgacctctgcaatcagcaatgattacaacatcctgaataattcgaaacctccagagcatctttctgaatttttttcatttatgaacaccagatcgcccacccaagaatcgccgacacatagcgatgtatcgagagatatcccgggggaagacagacagccattcagtgaccgaaacgtgaagagacaaccttcgttgaacacgtttacatcgttctctccttcagttttggacttgcccaatatcgtcacgtccaaagatttccatcataatgtagaggtgtattcgaatttgttgcagaaggcagaaaagttgcgaatacagctattgcaggtgtccaacgcagccaacgattttggccaggctttggaagattgcatagacgattgccccaaggtgaacaactcgaaggtagtgagagatggcttaataaatgcaagcggcttacagtatatgatcggcagcaatgagcaaatacttagtagattgatagagtccagttttgaaagacctttgcgaaaggaattgaatgacttgaagacagactacgaagtgaactactcgttctaccaacaggaaattaaagccaagtcgaaagtccttcgtcaaaaggagttggaaaacctaaagctttcgaaacaaaagacaagaaatctcaatgtgtacaagagcaatcttctaaacttgacgtcacaacttgacgaaattgaccgtctcaagtacgactactaccacgaagtgaactcaatgatatctaaattcaaccaagatcatttgctcataaaaacaggatccttggtgagagcacaactagagattgcagagggtatagctagaaaaggttggtctggtgggggtttggatgaactcttatcggtatcaccagatctctttgaaactaacgattctgacgacaccgcttttaaaggaaccaacgataccgacaatgaaacgggtgatggacttttagacaagacgatagaaaacaatttcctttctgaccgggcaatagcagaaacagaagagaacaatgtcatcgaagatgatgatgtaggcaatgacactcttgagacagttagggctgtaactcctgatgcaaagaaaaatcctgttgtagccagagcaggattatcaccaaatatagttagtcagttaaagaagccggctgattcagcagaacaaagctttgacgaatcattttctctaccaatcatcaataaatccaattcattgttgcacaagctcaatgaacaagagagctcaccgattccagacgagagcatacagaacaataacatacttgacgaacttgatgagtagtttctaaaactagatatacaattttatgaattggatatatatttaccacttattagtaatgtattataattgaaagacgtacacacaaatgtgttatgatttatgtatgaaacgagatagtcgaagatttgtcctcttcatttataacagcattgtcaagcttctcctttctgaaactcttcattggtcgcaatccccacttcttcaacatctcgatgtcttcgtcccatccattgcacatggttgtcaacatcttttcacctgtgaaaatggcattgcagccactcataaagcaaaggaactgttcgtgttctttcatggtataacggccagctgccaatctgatgatcgaatgaggcataattaatctcgcagtagcaatcgtcttcaagatcagctcaaacttcaactttctgatagaatctccaggcaattcagaaatctccttttccattggagttcctttgatgggcaccaatctgttgataggtaatgattctggatggtactccatggttgctagagtatgtaagaaagaaatatgatcatctggtgtttcacctaaaccaagaatacctccagtacaagccttgataccagctttttgtacgttcttgatagtttgcaatctgtcatcgaatgttctcgtagaaatcacacttggatagtgttctcttgaagtgtcgatattatgattataagctgtcaatccagagcgagccaattcttcagcttgtttttcatctaccattcccaaagtgacacatgtttccatttcaagatcatcgttgattcttttgaccatttctccaattttcttcaaaccagacttgcggccagccatgtccctccatgctgcacccatgcaaaatctggtagagccattcattttagcaatgcgagctttttccatgacttcttctatcttgataagcttttcagcctttgttccagtgtcgtaacgtgaagactgggcacaatacttacaatcttcggtacaccccccagttttaatagacaacaaagtacacaattgaacttcagcagggttatggtgctttctatgttgtaactgtgactgaaatactaactccatcaacggagtatcgtagatctctttgatttgctctttggaccaattattgataggaacttttgtagaaagagccaattcgattggtttcatcttggtgggcgtagctaaattctcagtctggacattgaagtaaatagatgaatctactggtgtggaagacttcgctagaatagtactacttacttttggctggagtctcttagcagtagtggagaacaaactttgagagactttaaacatgacgactaggaagcgagagagaatcgaaattgcagctgaaaagaagctggaagctagcctaatctatgtaagaaggtctgacattttaacaataaataattggtcgatttggagctgggctcaggggatgggttgcatgcggaaatgattgcaaaatccgggttgcaatcgacaaaaatgaatcatctgagtcatggctgagtcaaagtgggagtgtaatcatcgcacaaggatgattcaactgatcacgtgaaaatacaacttacagggctccagacctaagactcgattttaaagagatttgaaaagtcgtgcgcgaaactacaaatttcatacacagtccgcttctcttcgcatgtaccatatagcagaataatttttcaatttactacagttttctctactcacaatcattcaacaaatataatcaaaatggctccaattgtatgtatgacatagtctaagaaatcacactgagataaaacgaatctgcaaacccgcttggattgctgtattccagatataggaactatagttttttggacctcttatggcatcataggatattgaaattgtgtattcgtaatacgttattcattatctacactatgattctgttcaagacggtctttttttttaaaagaagcaacaagatacttgtaatgagaccttttagatatactctgggagggctatgctgtctttttatcttctacacctttaagtgtgtatcgtgataaatatgtgcggtaggctaacattaatatagaccactaagaagtccaaggctgctaagaagttcgtcgttgacgtttccgctccagttgaaaacggtgttttcgaccaagaaggttacgttaagtacttgattgaacacatcaaggtcgaaggtattgtcggtaacttgggtgacgaaatctctgtctctgctgaaggtaccaaggtcgttgttgtttccaacaccaagttctccggtaagtacttgaagtacttgaccaagagatacttgaagaagaaccaaatcagagactggattagattcgttgctgtcaagcaaaaccaatacaccttgcaattctactctgtcgctgaagacgaagaagaagaagacgaagaataagcgcatcacccatttgacttatagacacagtctaactgtggttttcaaaattgtttatcgttcacttttcctcttttttggcattcatttcaatcatatttttgtttcctggggtttataatgtttaataggttcttatctatgtatctatcaaaataataagttttctttgataagcagaataaacacaattcaaaatcgatatgtagctgtagaataacgaacgattaggtatcaagaagttgaagtattgacaattgtaagtttgactatttgtcagcccgaaacgttttagttaactcttgcatggcacaaaaccttaaaatgctattatgcccaactagtgaaacaggtgtttacggccgaatactagcaagataaaccaccgaagaagcaaatccgtccacagttagctattgttgtcacttcatccacaattacttagaactatccacagtccttagacggaaaactcatctgccaattttgtgtcccactggcgtaatacccgtgctgattataaatgcgaatcttatctggatatcttgagagtttgccttctatacataaataggtgtaaatatctagtggcctcactcatttttattgtggtcatcagctcaatagcaattgtcattcaatttgaaatagtttcattgagttaaaacatttagagagaaccttttagtcgggtataatttacttactatcctttcgcaaccattttgagaatgtctaccaaagtttttgttagtggagccactggtttcatcgcaagacagaccatcaaattacttttgtctagaggttataaagttgttggttcagtcagatcttctgaaaagggagaaatcttgaagaagtcgtatggagcctccttctcctacgaaattgtagaagttcttgaacgagatggtgcttttgatgaagccttgaagaagcacccagatgtaaccatctttttgcatacagcttctcccgtgactcccttttcgacagaattagagaagaatgttctaattcctgccatcagcggaaccaagtatgtgttgaagtcaatttatgaatatgcccctcagataaccagagtggtggtgaccagttcgtgggctgccatcattcctgtcccagatcgtttcaaccctaagtttgtcggcagcgaagatatttggaatccaattacttacgaggaagccaaacaggatagcattcatgcttacttcggatcaaaaacatttgctgaaaaagccgcctgggagtttgtcgaaaagaacaaacctaacttcgatctctcaactgtcaatccagtgtttgtccttggtcctcagtcaaaggatgaagaagtgaaggatacattaaatgtcactgctgaattggtaaactctattttaaaattgaaccccaaggacgaagttccaactcttgaaggaaattttgtagatgtgagagatgtagctttagcccacgtcttagcttttgaaaaagaggaggccaagggtcagagacttgttcttgttactgaaagatacagtggtcaacttgtattagatattatcagaaagaacttcccggaacttggagacaagttaccagttggagtgccaggaagtaaagatggttccaactttgcggcaccaaacgataagaagaccagaagtatacttggtttcgatcgtattaacttagagaagtcggtagtagatgcagttgagcagattcagagagtgaaggcataagaaatataagcttctatatagatttttctaggcagacacggatgagaatagtcaaaacaatagaagttagaatgcatgaatattgtagaataccaatgccaattgtttaggatataaaggaatccgtgcccaacaaataaatcaagaaacaccaactaagttttaattttccatatattctcaggttatcaagtttcaaaaagatacaccgtagaaaattctaactaccaatagcaaatcaccctatgttgtttccttatctaatttaatttattctatgatatttatcaaaaccggattgaaaaacaacaatttcggaaaccttgacggaaaagttgacagtccatgcatataccccctatgcattgaccaatttagagaatttgtgagattgattttgattgatttggtgaaagacttcctttgtttaacagccaatataagttctcattgatattcattccatactctgagcattcttttggacgttggagattatccagcttactaacattttattaccgattcacaactaccattgtacgtttgcactaagttatttgaacatagatatattcaactatgtttaggagaccacacaaaattttccgtatttgtatgtttgcaaccaatactgcatatatgtatttaatgatccggttgacactatcgtgtccactctaccaagtctaattatactcttgcaaaaagaagacaatatgtcatagttgtagaagtaaacgttatattttaatttaagcttacttaaatacatatacctttttcctaaactcaaccactgaaacaaaatagtcacactctccatgtgtctgttttaatcgcctggagagacaactttcgtccttctgagcaattattcattctacagtttttcaattataatgcactttgtgtctaccatttagagaattatggaaattcaagaatgcgagcgtgagtactactctacaaagggcataacctcattacaaaactaattggtgaaggtgttacggaaatgctgctggatttcgccatctcttggatgagagcagctctttacctctttgaaaattcttgcaaaaaatacttcagtattttgaagtagatatcgcttgggaggagataccacgtacttgtttcaatactgaagggcatgaaagcctattgaaaccttgtggccagtaaagacagacaactctgacctgtactagtaggaaatcaatattaatccttattgatcgacaaatctctaaatcagttctccacttctgttcgtatctccgttatacactatgcaaagatatcatgatcggcgcctagtagattcgtaacccaaacatgagttttcccttgaagcgaagagcatgttcctctaaccttgaaaggctaaagctccaactcgaatgtggatgtcgatgcttcaaggagtgaaaaccgtacaggcaccggaaaaacgactgattgggagaagtaggagtagtagtacagagaccagaataaggttttttgtagaatttgataccatcacattggtagtcaatccatttgccaagatatgcaccacgatcttcaagaactgtttcttgaatcacttgcaaatgttgaacaaactcaccaaggtcggaaacctccttaatattcagagagtagacaggacaggctctgaagtagatatcctttacctcctctagagaaatggcaccatattcgattaactttccaagcattaatggaacctgatcaacagtgataggcgcagttgatattcttatcggatactttgaatcaagttccagaatataaggctgaaaagattgatgacttccaagacccacttcaattagcaggtagcacatttgttccatgttacatggagaatgaactacgtgttttttggaacgatactggaagtcagtagtgctattccaattgattggagcagtgacaaaacatattttctgcaccttctgaatactctcttccacagtgggaactgctggaaggcttcttttatggccactgcaccagatgctgacctgtgattctgacggatatttttgaaattttggtggaacctggagaaattctcttccttgaaatggagtcttgagacgctcaccacaacatggaagggttggaggatcaataataacttcaggaaccatcaatggaggatccccaaattcaaaagtatcaacagaagtcgtaacattagggaaaataggatcttcaacatttgcatgttttgacttagaaacaatctcggatagagagccaagtgactgaagaggaactgaatatgcagtgatagactgttcacatactttaagctgatctttgtcaacactagtaacattgtccactaacttcttagatcttctgaatttcaatcttgaatccacctttatatgctgaacccttgtgttggactcagattcagacaattgagggtcagcccaacctcgattcacaaatctattgatgtattcaatttcattcaattcatcatagttcaagtagtcgtcaatggaatcttctcggccaatatcaatatgatcctcttctccggcacttacaaacttggggttgtctgatgattgatggttggttgcagtagttgcagcagtttcaagtcggtgacatatttccttctcttcttcacaggaataaataccagctaaaacttcactaaatgaacaaggctcactactttcagtagttccaagaggaccaacaggtttggcttcagatagttggtctatcggaatgggttcaagaacctgcgtgtagagtgctggagcatagtgatcgatagtgtccaaagagttcggaccagtgacttcaccgatggtgtacctcagaatcgattctctactactgaagtataaatgtctggcattcttgtagaatgaagctaaatctccacaggcacaattgtcgatactcatggtattcgtggtggtagtgttatcagatgctgcgattggaggtgtattgcaggtcgaagcaaaggtgtcattgatgttgccgtattgttcctggagctccttgttctcaggagtatgatcaaaaccacataaagtaggtgatttcagctttccgatgtttttgaagagccaagggacttgattcttgagattgctggcctgaagccgccatctccgactcctgcttgctgccatactgtcggggagtggagtagcgaacttcttactcctcccatgttcaaagacagatatcagagctttgcgaaggagtgttaggttgtgtgacttttcccctgctctacatctctcattctccttctgttcttcgacgaacaagctaacgaagacattggcagcactgcggagtttggcgctgacgggggtttcgtcccttccgaagatagagtaaaacatatttgaaagtacacaagtatggaaatataagaagcggtttcaaagtagggatacttgggtgtcgaccgaacaaaccgttgaaatccagatattgattaattgtgtttgtggattctggcgcactagacccactacgatttttcgcagccaaatctgagtttgatacaatcggagattttgcacctattcaaggtttgatctcgtttactttattcacgagagttgaaacttttgactagaatattctctgcttcctctcgtacatcaatgtgggcctgtgctattttaggtgaataaacttgtttgattaaaccaatatatatttgagtgttgatagcctctattggagtgtataaaagatataatatcccaaagaatattgttgctgccaggtcaaagcgtcttagcgggaaaatagacaattggtttcaaaaattttagtttgcagaatttgagctgtataaagaactggccctagaagtccactattggttttgtcttcaacctgggaagaagacaaatattcaatggtcgataacaaattcatgctgaaagttgtatctaggttgtatactaaaacgaaatcaagaatattcacattctaatctaacgacgatcaaaagttctgaactgtttagaacactcacaacaatgaaacaacaagaatcctttaactacctgtgttgctataaactccagtatgaagaggaaatcacagtcaggagaaagacgctacacttgaccgtacagatctagaggttcccgaaaatcaacctagttgcaaaatagccttagttgcaacctctggtacgtgcagtcaagacaacttatactacaaaggaaaagctactgaagacaaaccactctctacaatttaagtgcaacatgaaacaaaaatgtctacccttggctcgaatgatgaatcagctatctgcaaccgatttccagcgccatattcccctatatggctccaatttttcatatttccaaagccaatcacgccatatggtgggtattcaccacgagggtgcatattgcgatcagcatacatgattggtccgtgaagccggcgatattggctctttagattctttcagggcaaaccgattaatccttattattttgctccagcaatttagaatattttctacccgcgacaagcggagaagtacagtagtcatgaagttgaaaaaggtggggaatccggcgccgtacaggaaatcacgaggtgaagaaggcatcgagtttggaacttaacaatggaagtagccagcaggagtcacatagtcatatttgttgttacaaactggaagttgaaatatgggcatctcttgataatttggatttttgttgcagatcaatttcttcggatgagttccgtcaaactttgagagtttcttaaagctactttcgcagtctttcatatggaacttagcacggattaacagagtctaccctggcttatatactgtgctacatattgtgctactactttctgagccaaaccacagactctacactattccgccggggtgtcattatcctgtctatattattcgggactgtattatttgggattcaatacgactacgcggtgccatactttatacttatatttgctataccatgcaaggtgaatatatattacttttcaataaaatatcacttgttgttttaataatctttaccagaaaatgcaaaccaaaccacctggggtgtttttttcctcctgtaattggccagatgttgtttcgtggtaacttcatcttggctctctaataatgctcataactcataactcatcggctcgaagcctcgtaacctctcggatttctcacttagaatcagttgatgttgttgtacatcttatgtttcaacgaacacatgacgatgttgtagttgtagatgaagctgttggtgaagtcgatgatgagatcggtgaatagaagcgtcaccattactatgttcatggcgtagtatagtaccgagtctagaagcgagtagaatttctcggtggtctctgagacgagtttgctgacagaattcatggcggaggttgttttagaaagtggcctctgtcgaaaacttttcagttttgatgtagaaacgtatacagcgtgtggagaagacttggtgaaacgagtactagctgcaaagattctcttctatatggcaattgcgcaaggtccagtggagtgcaacaagaaatacaaaaaagaaaaaggatgaagatacttcagaatgtccaagacgaacttgaatctcaattttttcctaagcttcgattgcaaatagttgtatatttatattttggctccgacgaaatcgacttgtggtagcgcagcgtacatatgcaatcggtcagagcatgctgcctacggatgcagcgtgcaggtatggaacaccaacctagttgaaaaaagaatggaaatctcaccgtgatgcctgcaggatacaaacaaacagtccataaacgccggatttgtgatcttcatatccatatgcagttagatttcaatatagattgcctatttcagacgagccagactagaccagtcatccgccgtcggtcagtgtcatccagatggctgaatagccacgccaataacgacaaggtcgggccgggaacagcgtagccgtttttttttggggttcgtatgttttctgtacactcaccgcttacgagattttttttgtcggcatttctgcttacaattgatgaattttcacatttagtcttgacttctcaatattgctttgaaatcaatcaccatgctttgtagttgacgactttcaattgaagacgtttgattgtgtttcttcaaatttctcttctgggaatctgacttatgtgctttggaatggtctggtctaagttaggctactgaatttacctactgaatctatctgatgaaattctttaaatgtattgactataattttcttctttagtgaagatagctattcttttttatacgaatactatgggagtaacactgacgaaccgtacagtccgcagcatcctatgctaatgtagagtgtagttctctttcttctggctcaagcacctgccttcaactcacttctgacccaaccttcaagacctcccttgacaatgatgtcctgaagattggtacccaattcaccgaccttctgcttcaacaccacgttgccttcgctgtctttgacttcgacagtagcagtagtgacatcccacttgaggatccagcctgtgcggacagtcaactcgtctgaaccggcgtacttagctctcaagttgttgatcaagtcggggatttccaacgtcaacaaagcgttgttgatggaatttctcaggaagatgttaccgaaggaaccagcaacaaccaacttcattcctctggccaaaattgcagtggcagcctgttcacgagacgatccagtaccgaagttgtagccacttatgatgatatcgccagccttggtcttgccgttaaattcagcatcgtagttttccatacagacctcagccatcttttcacgaggtatatcatcctggtaggtgtacttaccggggtagataccatctgtgttgatgttgtcagcatcacagagaattaactcgccttcgataaccttagggaatccttccaagacttcaacagcaccaccagtagcagcatcttcagaaactttagtttcttcaatagtctttatgatctctctggtagagagaacagattttccctccaattcctgcggaccaccaattctacccaagacagcagaggctgcaacaacttcaggagaagccaagtaagccaaggcatccttggagcccattctacccttgaagttacgattggtagcagatataccgacttctccgtccttcaacaaaccagtaccaagtccaatgcagggaccgcagccagctggcaaaggctttgcaccagcttccaagatggttttccaggcaccagcagcctccgcatccttctggacgttagaagaagctgcagctacatagaactctacaccaggggcaaccttgtggccacggatgacatcagcagcagcttggatatcgctcaatctcgaattagtgcaactgaccaagtacgccttgttgatggggatatcctgctccaccaagtcagccaatgagttcaggatcttaacggagttggggccagaaatgtatggtgtcaatgagctcaagtccacgaccaagtgcttggcgtagacagcgtcgctgtcactctgtactggattcttttccaacgccgaaacagtcttatcgttcactctgggatggcctgagcccaacttggccaatctctcactacggtaccagtccaataaacgggcatcaacagggaataaaccagaaagggctccccattcagtggtcatattggcgattgtcaatctgtagtctatagacaagtgctcgatcccatctccaacaaattcgatggcatggttcaacacttcatctttattaaacgctccgcagagtgctacgatgatatccttaccggtgactccggcgggaagcttaccctgcaattccaccttggctacaggtggaatctgccaccacgtctgacccgtagcccagatcgaagcggcatcggttctaacgatcggagtacccaaagagcctacacctccgtaagtgttggagtgcgaatctgaagccacagtcaagttaagtggaaaggcataaccttcctcaatcataatttgatgaccaatacctcttccagctgggtagaagtcgattccctgttctttagcaaactgctcgatatttctgtacttttccaagttcttttccagcttgttctggacatcgtgatctaaggtacacactatctggcgattatctttgaccttggtagctcccaaacccatgaacttagtagctactggccacgagttgtcgtgggacatacaatgggctggcttgatagagacataatctccactaaagacctgttttccggcaggtaggttcacagcatatctttggacgatcttttcagtaagattctgacctctaaggagtctagccgacgtagctaggcctctgatgttgactcttagcatggttgtgtaataagaagaaaactaaaagctgtttaaaattttcaaactttctattattgaaattccattattaatttttcaacttttcactccagattatctgaaaaatttgatagcgcctgtatcggctgcataatccgtgcggtatcttgaacgtatgagtcagaaggataagcggcagtacaattggtggatggtatgcaggagataaagataaatagagagcgtgagaagagtatagagcttgaattgcagagcttattctgaattagtgtggacacaattatggaaagaattatgatccagtcgattcgatttgaagatttgattgtgtatacaccattcttcaaagatctattatcttagttgctaatgagtctttccatatgccaccttgggtgagatatttgtatttgcgcattttaaacattttgcacccaaaagaagtggaaatacattgacaggaaatcttacaagataaagaggataaatgcagtagtgtggtacgaaacttgtgccttagcagttatttctgacaatgtttctatccatctctatcataactacgactccacgcactcacgacagatacgatacgcttcattaagttcgatcatatgcttcacttcaaatactaagttaaactacttatcttccgctacttcacacaatacctctatatcccattccattcctttaaccatacagcaattggatatcaacaacatatatctaccccagattatctcaattgtcacacagacgaccccgtcactgcataaacttgatctgccactttttcaagaacgtaagcggtcctgaggttaatgatatgtttcagatttgatccagactcttttcaattgtttttcttattgcgtagcaatgctcaaccttgcgctatctctagcagtagcgtcttcatatgttgctgccatatactttcaccagcctccacaggtcggaggaaaggacagaaacgagccccatgttataagatatagattcagaagaatcaccgtcttgtgtatagtattagtattagcattgccatggatagtacaggacgagaagtactcttacatggatatcataagacaactagggttgtgtcctggattatcccactcaatgaacgtatggacggatattatcaacatcgtgtacagtttcgtcctcatcattgtcctctttgttggtcctatttttctctaccttgtacagcctcatgaactacaagacgattttattaacaatttcactaccatacacggcataagagaccacatatttgctccaattaccgaggaactcatataccgaggagtgatactcgccatcactcaagcatggtatacgccttatctttttggcgtagcccacatacatcatgcctaccatctttacaaatataagggcatacagctatcgatggttttattcaacagcgcattccagttcgtctacacatctttgtttggaattcttgctaatcatatatacatcaagtataactacaatctttggtgtcccattgtcgttcacatgatgtgcaacttgatgggatttcctagtttagttccagaagacggtgaatggcagacagtttattacattcttttggtagtaggactaggtggatttttcttcttgttgtaagcatattcatatagcaagaataaataaatagaatgaacaagcgtactagaagagtagaatatataggatttacaaagagagaataacaaatagagagttagagacaaaggaaatgattgcaaatccacaaattattttaagtttctcccatgtaaaggaaaccctgagctgagatcaagaatgtacgaagcttaacgagacgagaatttacgagtcaaggaaaagaacaacaaacaaggcaaacaaaaaagacccgttcacgtgacacattccatagtggtagaccaaacaaggcaactcctgtggtgttgttagttgacgaagtgaaacatcccctgagtaatgaggcgttgaaattacgtgtctgttccacctcggtggacgcggttgaaaggattgagggatcgcgtctgaatctgagaataatggaggagaagacagtagcgacaatagacttgtggattgtggattgtagatgctatctagcagtagtattgtacaagatctacgttgtacctttcgtaattaattactgtacggttatgaagaattgttgacgtaaatagtaattgaagatataaaattagtgtagtcgggagtcccgaataaagtctacagttcaatcttgcgtagcggagagagataacgacggcaataagtatcagcatcaagcgataacagttggttcaggcgacgttctaaacacttaaaccatacaaaccattactggactaggtaaaatagcagaattgtagactgtgaaattctatgaacttttagcgagacatttgctgtgaaaagggtgtcgattcaggtacacagccagattgggtaggagcaccctcatgattgtcgctattgtcgctaggaattgctggcattctcactaattgtcgctatcgcgcgactaccattctgttcagtaactttgaaacattgaatgacggtaagttagcagagcagtacagcagcttctaattatcatccaatctttattcttcgaaaatatagaactgcaatccctctaactataacctttgccaatttaatctgaaaatctacaacgattccggaggcagctgcaatcgtccgactagtttcgagatttccagattttccattctcacacaaaagcaggaaaaatttgatttgttttggctctaacgtgtactgttgattttgctcagactttcaccgttagcgaaatcagtctccagaatttactatcttttcttctttcgccacggataacacacgctggttccttagcacagtcgtcgtggagtcgtatagcattcgatctagtatctgatatagaaactggacctcagagccgaattgagacgctttactcgtctcctacgctttctctctgattctcgtctagtccttcgtttgtttccccagtattgcaacttgatttggtaaatttcacaatttttctcaatagaattcttctatatccgttatttattattgacgtctagcattggttaatgataattgttaattgaatctgatttaaacataatcagaatcgaatcaatagcaaccacaaattaacattcaatcaaatttcaatatagagaacacgaataacagtcaaaatcgagaatccagactacaacactatatcatatcatatcatttttttattatttatcatatcatatcaacacatcatatatcatataacatcactatgtcgctgcccaatagttctttccagaactacgagtcggctgttcaagacatcgagcaggaaaagaagatggtggcagctttgaaacgattgtctattggcaatatgatgagctatgatcctgatttaccaccgatgttagaagatatcgattccacatataagcaggctctctttgacgatcaagatgtcgcacccataccgatgtccaagtctccaccgtcttcgtcttcttctctgtcaacgacaccttcgcctccgtctgatcctctacccacagatgcttccacaccttctcctcctcatcataaacaatctcttcgtaggcagcagtccataacgcgtaaggggtcgataacttcgagacaaccgcacattgatcctgaccgcaacagtgtagctactctggaaagtgccgatgaatactacgatgctgaagactcagacgttctagatccctcttcattactttgggtcccagccaatttgcatcctcaggttaatccggattcgttcaagaacctagtgaagtcgcaagtagaagagatcatggaaagaaagctttcgagaaagagctcgatgtcacgaaagagctcactttctagcactacaagagaagaggtggctacagaaactgcagttgacgaagagaaggcaaagacctctccccgaaagctgcctgaaaacaaacgagattcgatcacgtctcagcccaatcgtttcagtaatccttctctcagagacttaaccaatgagcttgagaagttgaccaagatggccggaatgaacgctacagatgccgtgactttggctcggacactttcatctacatctttgggatatacagatgtagaaatcatggcatttgacgaaatggcatcgccgccccatacttcccctcagggaacactgagaagaatcgtagacctcaacaacagtgacaataatgtagatgatgattctgacgaaattggtgatccagattctccaacaagaatccatagtacgagttcaccccccatgtctccgccttctaagtcaactttacagatccagcaacgtttacagcagaagttccagatggcatacaatatgtctgaaagttctccttcttcaccacaaagtcggtctagcctgaatctgtccagatcgcaattgcaagatttcgcattgaaaagaagcaggagaccggactatagaaaacactctgttagttctggctcttcttcgcaatcaactgtggttcctgtagtacctgttgaaggaagttcgaaagtgcagcttaatcatggcagaaataccgatttgagacacctttctggccacggagaagttacgggtgcgaggagttcaacgcctccacctcaagtacctcccaagacaatgaaatcatcttctagtacattgaaagcgtcttccaatgcacagaagctgtctttaaatgcacagaagttgccagttagaagagactccaattctcgggattcgcagcttctctttagctacagagctcctgttgaacaagccgctccttctactagcgtccgtggtggcgaatcaccttatccaacttcacagagatctctggcccaaattgagaagcagttttcaggaaaatatggacctacaagtctttcagccaagaaggcttctcaagcaatgcttggtagacaagatggtagtaaaactgtagatatagaaagacaacgtagacacgaacagaagtctttgatgacaggaagctctccctaccatcgttctggttatccaccgcaacaaaaggctcatccttccggctcttctacttctctgtctcaaagaccacaaggcatgattccacagagtcagccacaaagtcaccatcagcatcaacatcgtcatctgccaccgcagcaacctcttcgtggtttgcagcaacaacctcatcaaagtattcaacagcaacagcaacagcagccacttagtctgcaacaacagatccaacagatccaacagcaacagtatttgcaacaacaacaacagcaacagcaacagcaacagcaacaatacttgcaacagcaccagcaccagcaacagaagtatcctagtcatagtgttcaacagcagatgccgtatccacagcagcaacagagacagcaacctgaacagaaaagaactagacatcattatagaagccatcaaggacaagttgatcctcaacttcttcatcgtcaacagaatccaattcagcatttgcaacaacaacttccacaacaacagtttctgtcccaacagatgttacatcaacagcaacatcagctgagaacacctatatcacagcagaaggctcagcggaccttacatcagccgtatgtagttccttcccaggtaaagtccaaccaattgagtcagaatttggatatgttgagatcggagatcaacgagttcaaagagagtttgaacaagactgaacttccatcaagttcggcaatgcgttctcataatcaacagccaagaaacattgcaagttctccaactaacgaagcccatgatgccgatttcagctttgaatcaacttatcaagacttgagttacgaggactcccttggcattgaaaagcaagtgctcgaagaactaggaaaacacgatggacatcatcgttacgaagcaagaacgattgctggtaaggagcaagttccagataccgaccagtcgaagaggatctctcctagaaagtctccgaagaagagccctaacaaacatcacgtttctcctgcgaaaactggtgtatcgactactcctgagatctctcctgttaagaaggtcaagagtgtaactaccacaccagacaattccaagaatgattcattgactccagacatttctcctatcaaggcagctgcaacttctacacctttgaagacttctccagagaagtgctctgtggaggtatctcacgacgaaaaagcgagagatgaaaatttcatcagaatagaacaaggttctcttccattatcctctcaagttgaaaaacagccaacgaagtctcctcccaagaggaaaagtagttctcctgttaatgtggagcgttctggcattcagtttggcgaaaatgatgaatcgaatccgttccttttagatacttctaaagcacagactccagttaccgaagttttgcacaaatcccgtgaaattgagccagaaattcaagcaagaaatcctcagaggcttcttgatagagctgcaattagtgattcaacagaagaatttagtccggagacttctcccataaagaaaatgaagaagaaggcatcttttggaatacttcctactacaaatgtgaaaaatacaccaaccagtgcttcttcaaatcctacaatagatactgcaaaagacaatacaaagaagatcaagaagaagaagtcatggggatggttgagagaacgttcagccagtctttcgtctatagatgctcaaaacttaccgcctcttcctgaaaacaagagtgctccatcaagatcattttcgaatcctgaaattgcatctactgatctggaagatgaggatatggaaacgactcctagaagaacagcaagtgctggaactcacactgattcttctggaaaagagaacttgatttccaaatttttcaagaagaaaaaggctccagccagtgttggcaatggaaatagatcaagtgcttcatctatccgtagtgtagagtccaaggaatctggagttacagtggactacgagtcggattctgatattaagctagtgaagaaaagtacagggttgttcaagaaaaagagcaaggtcaagctcttggaaaaggaaagggagaaggtcaagtctactttagacagcttggatcttgatttgaagagagaattaaactctcctgatatggaaattgatacagacagctactttgctcacaacaaagaaaatgtcactccagttgagccaaaggctgtggcaatggacaaagagaaagaaaagactgagagtgtcgaatttcataaggaagaaagtccggaaatacaaaccattgaaactcctgctctactagaactagagaatgaaggcttggaaaatgatgaaatgaatgaagaagagagcaaaccactgactactcttgaagttcaagagaaattgaaaaaatcaataaagagaacttcaaaggctaaccagcctattgagttcactgattcagcctttggatttcccttgcctccgccttcacagtctacgttgataatgcttgactatcgattcccagtgcatgttgaacgtgccatttaccgtttatcgcatttgaagttggccaaccccaaaagatcgttgagagagcaagtgttgctttccaacttcatgtatgcctatcttaacttagtagatcatacgttgcatatggaacatatgtccaatggagtcagtctagacttagaagaagaggatgaaaatgaagagaatggggctcagtttggtgacaatattattcaagacggagacgatgaagtgttgccaaacggtgaacccatacacattgacttggatatagttgatgttgaaaacattaatacttctagcattgaagtatagacgctagcatttgtcctctggacgcccttatacatacagttaatctaaatgcatataattacgaaaacacggtgtagatatagacgagtttctgtatttcgatggtgatgtataaaaattgttctgcttgtgtcctagatacacattctttgtttgcacccattgtcccaaatagagttgaatgttgcacagccgaaaatgaaccgaggaacaagtaggaaacaaatacatcgaattacatatttgaaaatgtaagcactcaaaaagcaacccacacaacagcaacaaattagatggcaattttaccgtaccactcgaaaatctcctgacaccacccaaattcacttattctatcttccacttatttgcttccatcgatacgaaactcgcctgtacacaagaatcagacaatatcgcgtagacagaaaaaataacactacaaaaagttgacagattctgaatcaatttttatatttggtaattcttttcttcacgaccaccttcgctagaaactaacatttcatatctcagatacacatatcatagaaatagacatatactgttcagtcattttattcagatactgcatcggatatcaatactacaacaactactttcttacttgatatctcattgatagatcaattttcaaattcatattgaagagttcatttactcctcgttctgtattgttctattgattattgtttataatcctgatttttctttgtatcttcatttgagatggccagaactttaccccttgtttcttccaaagaagttgagaaacacaatagcaagaaaagctgctgggttaccttatacgacagaaaggtgtatgatgttactaacttcttgaacgaacatccagctggcggcgatctcatcttgccttatgctggtaaagacgtgaccaagattatggctgactctgtttcacatgaacattcggaatctgcctacgagatgttggatgacggcatgttggtgggctacttggctactgctgctgaagagaacgatttgttgaacaacaagaataagacggccgtggaggtcaagttgtcgaatagtgaagactccgatatctatgagttccatgacaagttgcctgctgctgagaagatgtctattcagacggactacgacgacgatatcaagaaacacaagttcttggacttgaataagccgttgttgatgcaggttttgtttggaggtttttccaaggacttctacttggaccaggttcatagacccaggcactacggtaagggctctgccccattgtttggcaatttcttggaacctctttccttaactccatggtggcttgtacctacggtatggttgcctccaaatctctatttgttctacttgggattcacaaaccaatcgaaggttattgctctttctctttgggtgatgggcttgttcgtatggacttttgtagagtactgtttgcatagattcttgttccatttggaccactacttgcccgaccatcctgctgccttggcgttgcacttcttgttgcatggaatccaccactatttgcctatggatggatacagattggttttgcctccaacgttgtttgtctttttggcctatccattctacagactcgtctttggcatattccccttctacatggcttgttcgggctttgctggtggcactttgggctacatcatgtacgacgtcacccactacgtgttgcaccatacaaacttgccttcctaccttcaagaattaaagacctatcacttggagcaccactacaagaactacgagttgggtttcggcgtcaccagtaagttctgggacgttatttttgaaacagaaatcacttccaccttccaaaaaagaaactgatttttaaaaatcgaatttagatcgttaagtgttatgaaaaatctaatggtaccgtgctatatctgtccatgtaattagtctatggtttttatattttttacatactatctatttgcatacaactatatgccttaatccttcgtggcaatgatatggtttgtttttgtcttaataatacaatatttagaaatgaaagtttattggtaatgccgcaatgtgtacgaatctgcctttaacgctgtggatccgttgttcaagaaatgaaagttgacagttttgatattgctgaagtcgtcttctatgggcatcacattagagggaacctttttcctcttcgatgtccatgaaatgctttctgttctgacttcgtttctaattctgttttcaaagatattcttaagcttggtctttttctgggcttcttcttcgcgaagatcaccatacgactgtataacatctttgtagtatcggacgggtcctccgccatcgcctcctgttgtaaggtattttaacgattcaagatacttgttgactgaaaatccctcagatgtgataatatctgaagtatccaatgactcttcatgttcctcttcttcattttcatcttcattttcatcttcatttatctcatcgtcaaattcatagttgtatcgtatcttttcgaataagtcttcacagtggtcatagacatccacatagaggtcagagtccacttttctgtatggagaagagtcttccgcctccaatgccagaagaagaatgtgttgccacgtaacaggacttttctgagtctggtgagtgatataactcagtacgttgttcaacacctgatcgattttatctgctagcttaaagctcatctgcttcactctaacattctcatatatatcatctttggtttccaaatacggctcgagatgtcccgattgcttcatcgcaaatatacgtttatggatccttgactctatggttgaagcaatttcgttcaccaagtcactcttactattggtgatcttttccgtgaaagtgactttcctaatgggcatcgtttttagcagaattaccctttcgtcttcatctgtattgtcacttatatcctctaaatattcacggtgttctcgaccagtttcctgggtgagttgagattgtgtttcctgagtatcttgtgactcttgggtatattgagtttcgggaaattcaccactggcatctacaaatacatcgccatcaccatcgccatcaccatcgccatcgccatcaaattccagcggaagctcgttgtcttccaatacttttgtgacatctggcattgaaggtgttgatgtaggtaggggactcagaagatgagatacagcagaatcaaattcaggctcagactcagaatactcaatctcagcacccacacccgcatctgagcctggatctgagtcatttatggtttctttcatatgaatctttttcttatgttggctattccaccaagcttttgacattttcaagataagagacttatcgagacgtcttcttctttctgccacgtcaaggtaatcagcatcgatatcttttccaaaatagtcatttccaatacagttgtcagcgtatataaaggtagtctttggaacaggcacttggctgaacggaattggccagtaactccaattggtcttggggaagcacggatttattcttctaagtagtattgaggaatagagatgaatcgccaaatccccccgatagtcattttcgaggaggtttaagatctcgtttctttccgaacgtgtggccattttgttttcatataaacatttcttgtcttagcataagcttagggatttatggtagttgttcatagtgcatttttcaggttcaaatggtagattgtttttcagagatgagttgcgcatttccactttgggaacaaaaatttgtcgcagccatttacttggaacatgtgagtagttcaacgaaaatgcatgcccaatagttatcaggtagatagtctttagcatagccgtggagataaacgtttatcatatttgcacagcttcttactgttttcgtaatatagatatgtctattagttactcattcacttacatacataacgttagatcaactgctttcactttcccgtatctggaccatctcgtgttcctctgcattaatatcgtcgtagtttcctttttcctcgtccacccagtgctttttgctttccttcactatttgtacaatattcaagttccgaatgataagctcatcggctacttctccatctagatgttccaattcctcctttggaataatccagggccatacccatttggaacaaatggcaaaaaacataagtacccctgggaagccaacagcgcctttagtacaagttatagcgaactccagtaaaccagcaataacctgcaacaacaagtagatgtagaaccacttcttgttcttgatattgtgaatgtctttgaacatccgtggacatgtaggatcagactcgacatactcgctgtccaagaacaagtatctgatcttgttggttatcggattgccatgtaatcctgtcaagcccataacgaaaaacaaacctgctagtacagcttgtggaattaaacctagcactactaggaaaggtctagtcatcatcacgaatgttatcaagccctgagctgtgttcgtcactctttgctctacgacagaaacaaccttgccatgtttattgtgaacaagcaatgagtccgtgtgcaagggagcttgaggaataagaccattcggagcaggtatacctatgattccagcgactccagttgttattcccaataaggcaaagtcccaatggaacgaagaaggtttggtaagaggataatcgctcagctgacacattagagacgagacgttatggtcaaagtagaacaaaaacgtcaagagaactgcaaacggaagcgctagaaacacatctgctacagcaatattctcacctggccagaaatgaacaaaccagccgtgtgatctatccagccccgcataagtaggttggaacgatttagtgataggtaatctcgcaagttcagttttgtcgagctttccaccaaaatgaatgaagccagtgaaaaatactacagctaaaggtacaccgtagtccacaaagaattttctagtccagtgcttaaagtagtgcaagtagctaccgaaaaggaaactgcccacaccacagatgaccataagaagcgaaatcattactgaacaatagccactggccaaatctactgcgtcaaactgtcgtccgaggatctgaatccccttctggatgtatacgatacatatgaagaagccaaaaacctcacatgagaacttactaatgatttttaaaaaggcaatgtagttgcctacagctattataatgtggaaaaccatcgaccagaggtatatccagcacatgaacgggaaatacggtgtcccccttggttgaataagctcgtagaccgtatagctgaaaatcgatactgggccagtgactcctacaatacagagaggctgcccagagaacaacccaaacactacacctgctatagcagtgcttagcaatacctcattgactccatatgcactgttggtcttgtcaaacatgtcttgagcaaacgctatggctggtagcaaattagtgaaaaatacaaatgtcgtagatggaactactctgtagttaaaagcatcagcgaagtccgatttatagtacggcaaccggctcttgatgtcgttgtagataccgtagccccaatagctgaagggattggaaagccggcgaattcccatactgccaaagatattgtagatctggtactcaagatattaaaaattggatatagtattgaattttagtagttgcgagtgctatgggaacaaattggataccaatagctgagatatcacgaatgagttgattaagtatacttatgtatccttctatgaatttctacaaattcatataaataccagcagccagaaggagttatttatatgaaataataagccagataatgtgaaaataggtaaatcccgtcttcacagtatttttctacacatctaatcttcactatgacagcagtagattttttctgggtagcgtttcttttatcggctagagatgtcctgcatttttgggtgtagactggagaatcgaaccttgcaagcagacggaacgtgcgccagggtcagtcataggccagataatcgccgagtccaggaatacaacctatgtatgtatgaattctcatggatacaaatgaataattgtcttgtatttggttaataattgaactcattaccgagtctacgagatctttaacattacaaaagaatttttttcgcaaaatccaaccttattacaaaataatcttcctccaatccatatcgaagggtggaggaaatcctaggataaaaacctccgaataatattacctaaaaactaggtgatatccttagaaagctgtagaaaactgagcaacggtataagctacaggacttgtaagattgtttaagtaagacgtctgactgcagaatcgatgcccaagaagaaagtgttgacagagagaatgattccctctcttcactgctccgtcgtcgaacttgaaataagtagacggtaaatcgatttagaaataggaattcatccagaggaagattaaacttaccaatgatgttgtttaaatctatggtcataccttcaggccctaacaaatgctagaaagtgcggctagcctcacagtcttgtcatttatggtgagagtatttccgtctttcaattgagtggagacacattacacaatcttcaagaacctcctgaactccaccgcgttctcggtggccaaggtggaccctgtgtagttccttagtccctttcggatgaaggagttgtgctttgtagagaaccttccaaaaactttgtgtaatttacctgtaacagagggagcttttgaagaagcgtacagagctacacgccgggacttgttgctcgtattttgccgatcgacgactgaaggtcggtcgaccaattcggctagtatagtgagtattctaggttttttggctttttggttattcttggtgtacaaggtgaagagagtcttcttgttctggcaattttgagaggcttgttgaaaactctaaggaagtggaaaggatttcattattatcatttgcagccatttactgatcctgtacctgttatatcgcgtgactgtgaaaaattttcgaaatcgaagtttcaaaaccttccatagtggagctaaaatgggtctggttctgaataatcagtgcatcaatgacattatccggtagtttaatctgtttctcggaagtagttgacatcactggctcgaaatagggctcttacccgccattttcattggcatctgttgactcgccatcgaggctcatcagatcagagggtgcgacatcgtcgtgtgaatttcggtcaatatttggtacttctggttcattcgagtcttgatattaaaagaattcatcagatataacccttagatgacactctagctgactaattgaacgtgtatctgacattattgacatttttgaattttttttttttgacgaaatggcatgtattacgactaaagtctaacctatctactacaaagtatataaatcatcctctaatccataccgaatggtggaggaaatcctaggataaaaacctccgagtgaaatcacctaaaaactaggtgatatccttagaaaactgtagaaaactggacaacggtatatgctaccggacttgtaaaatgtttaaataagacgtctagactgcaaaatcgatacccaagtagaaagtgttgacagagagaaggattccctgtcttcactgttccgccgtcgaacttgaaataagtagacagtaaggaagtatcgatttagagaaaggaaagcagccacgggaagttcaaacttaccaatgatgttgtttaaatctaggttcataccttcaggccctaacaaattccaaaacgtgcggctagcctcacagtcttggtaggtatggtgaaagtatttccgtctttcaattgagttgaggcacattacacaatcttcaagagcctccggattgccctggcgttcgcggtgaccaaggtggaccctgtgtaattcctctgtccctttgggatgaagaagttgtactttataaagagccttccaaaacttggggtaattgtcctgtagcaggggaaacttttgaagtagcgtactggagctacacaccggtgcttgttgctcatatttggctgatctacgagtaaatgtcatgcgatcaacacggctggtgatgtgtttatcccagtccagctgaagtggcggattacgcaccatctcttgtttctcgttaagcgtgaaaggctttttaaaatatgaattaatccaaaacctcctacccctttcatccgggatatggtagcggtttttcggcttaatgatggtaaaccatgcttcgagccatgctatttcggctctggtgaattgagtgtaggtcttgtacgctgacattgcatgatctttgttttggaccgcgtagttcacaaggaaaaggtaccacggtacgatgtcccatttcaggggatcaagttgattgcgtgtcggagggtaaattgtatcaatgaaggattgaagtttgtcacggagaactatgagattccaatccaccagattcgtcaacgtttcgtagataacttttgcccgtcttcctaagagctgttgcttgacattgagtagtccgaagccccctttctttttcaagctactaaggtttctgtcgctaatgcgagggagatgtccctttaccatctttttgatgtgcttgatattgtcatttgccatgggatcatgtaggtctcggaagtaaattttcgagaagatgtaagtattgaaccccgtgcatctgagatgaattggcaattcttgtatggtgtggaaatgtagctgtgtggaaagagaggagatatacgaatcccatctgaagccgttaagcggaactccgaggtatttgtagtcagtggtgctaatgtcaaggacttcaaagccaaggatcttggtaacatcttcgggaggggactggccccagtggcaggttcgggacttggcgatactgaccaacgagttggatgcttgttcaaatagagtaagttcttctttgagaatttcatgatctctggttcccttcacaaaaactgtgagatcatctgcaaaggctgaatatttcgctgttagcggtggtagatggtcgagttgaatcggaattccctcgagccgactctgtaatcgttgtaaaagaggctccaagcagagattgaaaaggataggcagcactgggttgccttgtctcgttccctgtttgagtggaaaggtctctgactttgtgttgttggtaaaaatggctgcaaattgttgtgtcgttaccaggagcaagatccgcttgaatctggggccaaagccaagttggtcgagtactgcagacaaatagtcgtgcgatatccgatcaaatgctttagtcaagtccaatataatgacatttgcacttttcagagtctcggggtcttttgatactttgtcgatgagggcccggaaccgttggatttgaaagtccatctggcgttcgggcataaagccgcattggtcatagccgatgaggtccttggtcaccttttgaaggcgcatattaaggacctgcgaaatcacccttaaagaagtattaataagggagatgggacggaaatcatcgaccgtgaggtccttacgttttcccttgggtatcaaacggatgagaactagagccattgactctggtaatattcccgtttgcatgatattctccgcgtcctttgttaatagtgggcctgccttgtcccagatagcctttaggaaaagataggtcactccatcttctcctggcgtggagctgttggcagtccgctgtaatccggacgtaagttcttcatatgtgattggcttttcaagctccacactgtcgctggctgatactttgcgacggaacagctgtacatacctcctaatggagagtttggcttcttgggcctgggaatccaggtaaagcgctgcaaggtgttctcgttgtatctctagtatatctttggttgtgatggcggtgcgagcccgatctgcggttgtgagtgtactcacaattgttgctgcatgggttgcccctttgaaccggtcgttgagatccttgaagatctttggtggttgcctctcttctatttgggaagtgaccgactgttgatttctaagatagcctattattctaggcaatcgttttatgaatgcagtgtagtcggaaaatcttgtttgttgtaagatactgaagagatgtgtgttgtctagccagtggtcctttacgatgaagcggggttttctgatttttaaggtcgcttttggaaggataataaggtctatttcaactgttatatgagttgatgagattatgccttctttgtgttgatggtatcgccaaaccctgtctttaagagacgtggggagatagatacgatcgaggcggcgacaatttcggaaattgtcattcgtgaataatttgatttgaggatcgagccctctgagagtgtcgtggagttgtaagccatggaagatagcattgaatgcatcgcgtgatgcgacttccgtgttttgtccgacgtgaaaggagtcaatttcagggtcaaggaccatgttgaaatcgccccctaggcagacgtggaatgtagctcctgcgttgtttagtttgaagctttgggtgatgatgtcaatttgggagtgtaatgaggtaaacaacttggcctgagccggatagttcccgcttgggccgtacacggatattatgaggatgtattcctctttctccgttagtttgatgatggcgtcagttgcatagggagcaaggtcggcgtctagatcaaggttgttacttgatatttgctggaagtgggagtactggagatttaagattatcccagtgcgtgatgaagtgttggtgtagattaactccttttgggagtctttcaatgtattcaggagcccaagaatccattccggtgtcaaatttggcagcgaagtagaagaggtttcctggaacaggttgttgtagtttaggttttgagagtggaaaacagtttcctggatgaggagaatgtcgcatttatgtgctagttctcgaattttcgcaggatcctggtttcgttgaatgttcttggatctaatcgttattaagttgttgcgatgattcacttccgatgcctttaaggtcggattggttatcgccgtatctagtagattactcatattaataatctattgtgttggaggggttggcttcgtgtgagccaatcgtgacagttaccggttgatgagccaaattagtatggtcaacaatgtcctggtgtatacttggagagtcgacttgtgttgggtcgacgctttgactttgaaatcttagtgaagggtcagatctttccatgttgtccaaaattgtggattccggttcccctagagtggatcctagtggggaatccgtgatatccatgactctggcaggaggatctgttattggcggaggatctcgtagtgttgggatgcggctggctgaggtgttttgtgcctgcagttcgtcgcggcttaaactaagagtcttattaagtgcttcatgcaccctttgggactgtcttagagtctgacttttgttggagtgggagagtcctataataggagagtaaggggtcggttgcttccttgtgagaggggctaggcgacccgagtaggatggtgaagagattggggttgctaggggtttggtttttgatgtgacaagggatttaccttgctttcttgggcgaggcgtgattggttgaaggagcggttgtgttctggtcggtttgttgccagcggcattgattgtaggttctgggaggagctccatttcttggtcctgaacctggtggctaaggatgacggatgcttcatcgtcacggatatcttcatcttcgtctgaatcggtgtatcttactgtttcgtcatcatcatcttggatgtattccctttggatttgatcttgtggtctctcgttgtttgaggtattgcgaggtacccctgtagatttagggtgcatgatagctctcatggtttggtgggagtcaggttgtgctgactggttatggctcacgtgttctgttactcccgattctgggaggtcggcgagtggcgcgaatcgattacctccttgtctatgttgggagattaagggttgtggttcctttcggcgtggagcgcctttggtcaccgggttaaacccatcgtcgtccttttgatgttgtttgtatggacgtgcgttgttaggggattcgttctgataaaaatagggtacctttgcaaccggggccttgaatgttgggcatcgtttggttgagtgctgattggtgtgacatttgaaacagaattggtatgatgagataatgtctagttgtacaccctgcatgaaggcgttctttctgtttggaatcctatccgattccgtcgcaatcaaatagaaagcagactggaatcttgacagagtcgatctgcctttgtggagtggtacttcccttcggtgtttagctagaatatcgtatacgataggctctcgttcttccctgcgtaaagacctgtattgaggtacttgatacgtgtcaagcgtatttgggttgaacattgcttctaatagattgtctaagtttttgtttccaattggggcttttatacccacaagaaagacgttgggataactagaaagaggaataagtttaagtgtaaatctgtagttgccttcttcccctgtgtagtaagggtcgaatatttcttcaaatttagtcttcagccatttctttggaccttgagatttgaagcgtggaactacagtattactttcagtaatggagaagttaaagtttaagtgcagattgtcccggatatgtatgtggaaatactcctttatgtcataaatcctttgagtgatttgaagtgttttctccaactcttcaatttcaagttgggtattgttgatgccccgcttcaactcctgctccagagggtcccctggggatatctggttttggtaaaattgaagtgattttttgagactggcaatactctgctcggtgtgttcttctaactcatctaacctatcaggtatagtctccttaaagtgggtaagaattatcctagctttgtcctcgatgctcatttggggttttaacaggttcagtctgtattcaaatgagtcaatgtggactcttacatctaacttttcagcaacgtttctgccgattgtgctgagggttgacactcttacctcctcaggcgtatcccagtcgtcgaaccttttctgttggcccttatagtttgcttccgataacccttctaagtgactgataagtgtcgagtatgtgtcaaactggtcaaagacttcattggtggtaggaacgtccatcttcatctgttcttggagggcctccattttcagtctgtatgtttgaagtattttgtcggattctttatcgggaacatcttgaagaatatctgcccatttcgccttattagggtttggaagaggagtagatctaattgccttggggtttgagggatgaacccttttcttagaagaactctttgtggttcctaagagtgggtattcctctgcttcaaggtcttgtgtatttttttctgggatttttgtattttctgagtttttttggtttttatttaagtattgtaaagattcagaatttttttgggtttttgtattttctttaagttggtgtacaaggagagaatcttcttgttcgggcaagttcgagaggctggttgtagaatctaaagaaatgtgatccatttcattatcatcgtttgcagccatttcctggtcgtgtacctcgttaggcacgtgactttgaaaaatttccgaaactgaggtttcaaaactttccatagtaggacttaatggggtctggttctgaataaccagcccttccatgggattatcccgtagttgggccggttcctcagaggtagatgacactgcagtcacgaaggatggctctaaattgccgttttcatcggcatctgtggactcgccatcgaggtccatcagatcagggggtgcgacatggtcgtgtggatttcggtcaatatccggtggttttggctcgtttaaggcttgatttgaagagctttcaccagagaaaacccctagaggtccctctggctgattgattggtcgtagttctgacatttacggcactatttttctattgcggtatttcacggtcacgtgatcaaatttcattgttaactaattaggtctaaatattgactcgttctaatgcggaagcgcctccttagcttagtggtagagcgttgcacttgtaatgcaaaggtcgctagttcaattctggcaggaggcatagagccaaattcaaggcgcaaatggtttagtggtaaaatccaacgttgccatcgttgggcccccggttcgattccgggtttgcgcatttttttgtgatttttttaacgaatatcagaaaaactaaattttttgctattcatggattttagaaatccgaaaggcaatctcttttgctctcgtgctcgtctcgtttgtaggtttaacaaagcaatgtctaaggtagcagtatcaagagctgtgaaggctggtaagtaatagcattttcatttatcatcgagatcacaatactaactagtctatttaatagttcagaagttctatccaatcgcattggccgataaaacctgggataatactgggttgttactcgattcaagttctgataatattaaatcggatcaactcaatatactcctcacaattgacttgactcaatctgttgccgaagaggccgtcaagaaaagtgccaattttatcgtggcttaccacccattcatcttcagaggattgaagagcattacaacgaaagatcctcaacaaagatcgcttattaaactaatccagaataacattagtgtatactccccacatacagcagtagatagtgcctatggcggggtcaatgactacttggtagatggaataacttacggattcgatattcaatctagagaagcaattgaaaaggatgaaaatgctcaagattgcgggatgggccgtatagttactttgaagaaaccagctcccctttctaagctaattggaaacgttaaatgcagtttgggtttgaaatatgttcaaattgctcggggtagtggcacatctaaagaccatgaagtctccaccattgctatctgtgctggcgcgggaggctctgtattcaaaggaatcaaggcagacttatactttacaggagaattgtcacatcacgaagccttgtatttcacggagtcaggatcatcaattatcacaactaaccactccaacaccgaacgagcattcctaaaagtcattaagaagcaattgtcagagaccttgcaagacgccaatgtgtttgtaagtgaaaccgacagggacccatatgaattggcataaatagagagtctaccaccatattatggggaagctttgcatgatgttataacaatatcacgtgattgatttattcttgagcctaatttgtaactagatagaaggaagaggtaaagagggacataattattttcaaatataaagacaacatcagcatatgcaaacaagtagaaagtgatttacagtccaataataagtacgcaatatttgggtgtagttcgatttgcaacttagctttgtatacgttgaagtatggtgaagactgaaccccagaatttgcgtctctatgaccttgagggatgtctcccttcctacaacgtgaaatccacaattgtacaatgtgttggcactgactatgtgtttctatatggtggtttcgatgatatggatattttggatagcaatgtgtacttattgaacttgaagaccaagacctgggaggtggacgataagcatgatggtttatatagagagggtcatctggctgtctatataagcaatggcaatattttagtgttcggaggtgtaccatacgatgagtttccagtaccttcagttactcgtcaaagaactgctcctgcaacgtttcgaaaagatagtttgatgatgatctacaacatatacgacaggaaatggatcggacctccaccttttgcgcttgataatgcgccatcttcgagatcaagacatgcgtgctgtctttctccggaccattcaaagctatacgtaagcggaggacttgttaagtctgctccattggatgatttatattgctatgacttgacttctggttcgtggctgggtccaataagattcgtatctcgttttgatcatttcataacagtatatggcgataagctatattcatttggaggtttggataaggacatgaaccatgtcaaagacacaattactttctattcatttaagaatcatactattggccaaatctccataatacaaaaaccagagtcatccactatactagggaaggaggacgagctcaacctggagtttgattctcatagcacatacaatccaaatgattgcgaacgtctatacgtcgactcagtcattaatctgtctatcatattggatatttctctaccttcctggagtgctacatctggtgggttgatcatatctaatttcgatcttgatgacttcgaaactcaagaaacatttaatattcgtaatattgccatgatctacaatagagctaacaagatcgacgtcatgaactattcatggaaagaaacatttgtcaaagaaaatggaaccttgtacttgttggggacaaacttcaacagtacaaatgtggttcctgatacagcgaatgcaacagcagattcaatacctggcgaagatggcaccactgatggcatggacgaaatggaaaacgaagaagcatcgggcatagctaagttaggtgctctttttgagatgaaattgagtgatctcggaataccattccgcaaaaatattagcctcgagaaaagtcaaatccagagtagtattccattatcaatggattacgagaggtttcttttgagcgagcaattcactgatttcgagattgtaactttggccgatgaagaagatagagataaatatcaagaatctttctctataacggaactggacccttcaagtatcaaaattgtaaaggttcataaggcaattctattatccaggtggccccattttcaaagattaattgcaattgggatggcagaaacagttctgaataagatgtttattcctgaaccacatcgttgggtcaaaggattgctttattacttgtacgttggaacaataaatgttgattcttatgttcatgggccatatacaatattggattacctaggtttgtcaatgcttgcaaatatgtacgagcttccagatttgaggactttggcgatgcacaaattgttcaaactattcgaccaacttcaactatcatttgacgcgcagaacgatgagatgatttcaatattgcttaagctctggcgggaattatcctttgcaaacgaaatcgtccttcgtgtgaaagttatggatatgataagaagatactgggctactattactcggtcaaagccattcttctcgttgtccaaggatgaaatagtaaaactttgccaagattcaagtgatgaacctgttcccaaggtcaaaggagtgaatatgatggcaactcctcgttccaacagagcctcgttcgaatcaattgaaaacctcagcgatccacaaactccaattagaaatacccattctccgtttgttatagattcgcctcacaaccaaagtagtttcactagcttacaacaattgacaagtgttttcaatgatcatttatagcagaagtaaatagtctaattataggcactagaatacataccaagtcagttactttcgctgtcatctttgttcccttttttgtcatcacctgaaccaaataagtcaccgaagatcttgttcatctcgtttccaaccttgtcaagtatctctccgatatcatcaataacttcgtcaactaggttgcccttgctatccggatgttcttcaaaatcagtaggcttaggaattggctgagtttctaagcttgaaagtgtagactcttccgaaatcatcgactgcaatggataattattcgtgctgatagaaattgtgacttgctttgagtcagatggtcttttcttccacaatagatcgtaggtagcattgtagaccacatgttcaacagcaaatggaagatctgggaactctaactcatcaacccaatcgtttggcaattcatttgcacctgaaattttggaaaagacgttaacgtcactgccactatttggcgaaggaatgatattcaatgtgtcacagatgatgttgtaaacttcggtattcttgaacggatgtaccttcttagaagctcccaatctcagatcaaaatatggtccattccctaaaaagatggctctcatcaacaattctgtattattatagccatgaactcctttcggtgtatagtcgaaacctttctccttcatttgtttgtgtgttgtaatagaatatccaatctttggaatgagccaaatgggagcgagacgatagttaaatttgtgctccttttcttcaccaccaaaacaccattcctttggtaattcctcgactttatatagatcgaacttcttggtttctgattctcctaatttttcgatattgagttttatctcattatagatttcttcaactgagtacttcttaattggtcttaaaccaaacaatggccaaccatcaatatgttctaatttttccaaatcgatcaaatcatccaaataaatgagcctgtcgtttgaggttggggccattccgtggtcactgacgattatcgtgttcacgatgttctgtaagtttctctttccgatttccttttgcataagatcgataaaatcatccacatacgttaatgcatccgttaagttctggccgcttattccaaatttatgaccgaacagatctacagtaggcacataagttaagatcaattctggtctgtcatcgatgttttctctgtcaatccacttcataactctgttaactttggaagacaacaattcagaaccattatatctatcgaaatctttcgagggaccaactgtgggtacctcacttcctggccacatatgtacagcagcattcacaccttgattttcggctgtagtccagattggttcacctcccttccaaaagtcgggatcaagacctccacgcttaggatctgtatttacaaactgcttcttcaatattggatcgtagaatgtgtttccaacaattccatggtcagctggatcaagtcccgtaaccaaagtccaatggtttgggaatgtagatgatggaaaagatgggatcatgaaaggcgcaccgtgtccatccatgagtagagtatgcattgtaggggtaatttttggatttatatagtgagggtgaaatccgtctaatgatatgacgagagttgttggatgaaagtcatgtgttgaattactgataattcttttattgtatgagttaacataaacatttttgtgattacgaccaatgagatgaaaaatgacagctatcaagcttgccaacaatacagaccctaataccgttgtcactttgagtttattactcaatagtttgatctggtaatctctgatatcaaatgtgcgatattgttgatcgtcgtcgttgtcttgagagtcaatttcgaaatcttcactctcagtgttttctcgattcaacatctcatatgaatttcctcctattttcgatctagacttgaaaaatcccgctattttcaggatgaaatttttggacgaactgtcttcgaattcgtagtctaagttatctaaaaagtcgtggttatcgtccgttctaactaccttcgtttgattcgtttgttcctgaaatagaacatcgtcatcgggatcatcaatatcggtcacgggaacatccacagcaaaaggctgggggtgcgacgaatagttgacggacattttctgatgtttctattaaattctacaagtagttgttggtttttgcggtttgagtaggaagagtaaagaaatacgaagaatgtacatacctagcagtgtaacccttacagtaatataggaaaaggaaaaagactgcacgttgagcaaaaagtgaaaagcggagataacccgattcggaaataccgaaagatatgagttacgccaaaacctgaacttattacaactgtatatcaacttgtatatacctaacctttaaacttaatactttaacataatctagagaattgaaaacaataatgcgagtcttttggaactatacttatctctattgtcactaggggacatttagaaaacgtcaccttggtcgaacatggcgtcggcaaccttgatgaaaccagcaatgttggcacccttcaataaggatggcaagccagcagcgttcttttcagcagagtacttaacagcagtttcataacagttttcgaaacaagtgtacatgatgttcttcaactttgcgtcaacttcttcagcagtccattggactctttgtgagttttgggccatttccaaaccagagacggcaacaccaccacagttagcagccttacctggagcgtaccagacgttgttgtttctgttggcttcgaagatgtcaatggcttccttggtggaacccatgtttgaaccttcagcgacatatttgacaccagcctcgatcaaagcttgagcttcttcaccagagacttcattctgagtggcagagggcaaagcaatgtcgacctggccaaccttggcccatggtctcacaccagccaagtactcaacggagttggagccggagaaagcagaagcagagtccacgatgatttcttctaaagacttgaacttcaacttggcggcaccaatggcagcgatttgttcttgcgtgataccggtttgggaaatgatggagcccttagaatcagataaggaaacaactgtaccacccaattcaatgaccttgagagcagcgtattgtgcgacattaccagaaccagaaatagcaactctcttacccttgaaggattctttaccttgagtggccttttcgatcatcttttcgacgtagtagacaacaccataacccgtggcttctggacgaatcaaggaaccaccccaggtcaaacccttaccggtcaagataccagtccagttgttttgcatttgtttgtaggcaccaaagaggaaaccaatttcacggccaccaacaccaatgtcaccagctggaacatcagtatcagaaccgatgtatctggccaattgtctcatgaaggctacacagaatcttctgatttcagcatcggacctacccttagggttgaagtcacaaccacctttaccaccacccatggacaagccggtcaaagcatttttgaaaatttgttcgaaacccaagaacttcaagatcgacaaattgacggatggatggaatctcaatccacctttgtatggacccaaggcggagttgaattgaactctaaaaccattgttgacttcgatctcacccttgtcgttttcccaagagactctgaattggatgagtctttctgggacagagacaacagggataaccttcttgtactttggttgttcggtgaacaaggtagagtcttcaagagcgtggactaattcgttgtaagcttgttggaattcaggttcgtgtggcaagaccatttttgactgagtttaagtatcgataagtatgattgaagaaaaagagaagagtgaatttaaaaatcgtaacaggggaattgattcccaatatatatagaaaatttttcgattcaatttctatggcagtttattacacagcacaatttatggaaacaaaattgatgaattaagaaaatttctgttccggagaaaaatcggacatcaacattattctctacaagcagttattttttcattgtttcacatagttaactccagaaatgtgtcccgatgattcaatctaatttcttttagggcaattttctttttcagcaaaagagtcacttgaagattacgagcactgcacctgtaccaagcccgtaccttatctcaatctctggccaatcaatcgacgatgtgaaaattaatcaatcttcctgtgcaggagtctaatagctccattgctcaagtttgtagtcctttaacggagggaacacaaatggagaagcatatgagacggacctttacggtagtatgcaaactgtcgatttcaacagtggggggatctggcagttaccgggaccgctacaaggcagagggttgcaaggtggttccgtatactcgtgatttttaccgtcgcttgcaaaattttcgcttccaatttttcacttcgcatcctaccaactagttggtagttggtagcagcaattggtctgaatccgtatgagatctttcaagtctctgcagtatggggtccaatttggttgtaaaatgtggttcttaatagaagggagaaaagtcgtatggatcccaaacgtggtttttcgacggattatcgcattcataattgcgagatctaactataccctacgtgcctaatgtcagtgacacgttacattacaaaatttactgtatgcaactaagtagttcgctctggcgtattacttcggcccaccgaatattgccgaaagtcgggtttttttctatagacgaactaaactgctaggcatttcgattctccgcgacacattctttatcaagcgaatcagaacaattctcgggctcctggcaagaccaaagtccatgattcctaattgatgccaatttgtgcaagggcggcaactcgacacgcgccccacaaactctcttcatattaggcagctctaaccctttgaattgttcataccatcggatttcgtccagttcgattacgtagttcaatactgtatataccaacgaaatcgtagatacgttgcaagttttgcaaacttcttgatcaaatattagaaaaacatactgaattgtcctactttcttgcaaaggttgcaccactacctaactttccgtttttgcagtagccgaaattgtaattcactatacgaatcgtctataatttgtctttttgtaccattcacttttgactttattatctaaaaacaggattgtcaatgataaactatatgttcacctactgcactaaactttaccttacagtcttcccccactattgctgtgatagcagttgaaatgttattaatcatagacaaggataccttagtcttatgtgagtgagggtttaaatgcagtacgacgttctttggaacatactagtaaaatttgaaaaaatccatctcaatacacacccttaacttgacttgaagcattttcgacttatccaaaatggacaatagaaaggtgtacagctcctacagggacagaataagaagtatttctgtaccttaccgaaatcaaaatggatttctttcaaaagttaagagccttttcaacagcagtatcaatgaaggaaaaccaagtgaagactcatcattatcttcagaagcccaaacatcaaagattgatactcctttgaagaggaaaagcgaaagtcttgctgtagaatcaacaactgcgaatgaaattttatcgtcattcttcaaagagaagggagaccgaaacttgacagaagtagaatatgaaggcgttatggctcttttgtccaagtcaagagccaatactcccgtaaagagacagaggctaaaccaagatttcggaaatgacacagaaaattcaattttgaatgaaaaaagtttgccaccacgttctgctgcagtcgatattctgaaagtatttgctaccccttctgctcagaagactttaagaaatgttaacgctacaatgatccacgaccagtcttcccttattacagattatagccccgtataccacaccattaacgaaagttttggtaacagaagtatttcatctgtcaaacgtgtctatcaattctcaggattgccatcgccatatagaacaagaataagagcccccaagtcatcatctttgagatcgtctaaatccaaaacttcatcaaatgatgtccaaatgaatctaaggaaagagaagagcattaccaacaagtcgattaatacttcagccatccacaagccgcgcagtgcagctgcaacaacgttgctttcaattctagatggaaaacagacagatagtgaagataatgtcaatcctacgaaggcaaacatagggcgcttttcaaatccgtactcgtcgcaaccgtcgataaagaagatgaataagatcgaaaccgtcaataatacacataaaaacacgatcactgcaaatgatataaacaaaactatatcgtatgataaatcacaaactttgccaacaacaataaaacttgatgatactttcccgaagagtaagactaatttaacccataggactgaagcaagagtggaaaatgtacaaataccaaataaaacaaacggttatccagcattcaaggcaaatggtactagtaccaatagtatcccatcagttttaccaactgtcaaaaatgctataccaaaggaaaatatcaattttagcctgaaaacaacaaaatctagcattcctaacttttcgccagaacctgctgaaagtgaatatgaattcccagaattgacaccaatagaagtgggcttggatgctgctaaagttattcagtatgagatgctattcaatttttaatagaattacatataattaatatatataccgtttgagggtagtttctcagttcagtaaccgattcaggcttgctaactaagtctgtaaattttctaaacgagacgcggaacgagcttgcggcttgaatgaaaaaatgatcttagtattttttgtattagaactagtcttgacaccagtttttttgcaatatatacctatatagataccaatgactatgaaacttaactctgttctcttgattggaggctctggtttcctcggtctacacttgatcgaacaattttacagacattgccctaacacaaaattatatgtgtttgacgtgcgtccattgcctgacaagttggcttcctattttacgttcccgccagaacagattggatttttcaagggagacttaacttctgaaaaagatgtgtcagaggccataagcgagtccaaatgtgatgttattgttcattctgcttcacctatgcatgggttagcgcaagaaatttacacgaaagtcaatgttcaaggtacacagaatgtgattgaggttgctaagaagttgaaagtcaaagctttggtctatacatcatctgccggtgtgatattcaatggtcaagacgtcaaaaatgccaatgaatcgtggccatacccagaagtccacatggatggatacaatgaaacaaaggcaatcgccgaagcagcagttatggaagctaacgataagaacgggttgttaaccgtgtgtctcagaccagccggtatatttggtcctggggaccgccaattagttcctggtctaagggcaagtgccaagttgggccaatcgaagttccaattaggcgataacaacaacttgtttgattggacatatgtgggaaatgttgccgatgctcatgttttggcagcacagaaagtattggatccattgtatgcagaaagccttggtggagaaaccttctttgtcacaaatgatgccccaacctatttctggactttggccagaactgtttggaaagctgatggttacattgataagtattacattaaattgaataggcccgttgcaatcgtcttgggttatttctcagaattcttctcaaagttggctggaaaggagccaggtattacaccttttagagtgaaggttgtctgcgctcaccgttatcacgacatcatcaaagcgaaaacagttcttggttacaggccagcagtggatttggaacttggtattcgctacaccttggaatggatggacgaaacttcatgattctgctctaaaatgtaaatataaatactactcatatgaattttattaatcagacactaattagtaactatgtgatcaatgagcaagtttatcaatttcgagaggaacggcatattccgttttgagccagatgtagatacaacgtctagaatttaagttagtaatcaaatctttagatgaaaataaagcaagttgaacatactagttgaattgacacctctattaccattaagggtagaattttgactattgccagtagttgtggtgttgtttcccaattcggtcgaattgtgtttaatggcatgctccagtttatgttctcccacaatttttgattttggctgagtaggttcaatctctttagagtgcaattcctgattagaattaagtttggacataatggcatatgaatctttcggcatttgacttcctgagtcgcctttatttctcgatttgaccaaatatttggaattaacctcttcaacaccaccgtcccctccacgatagtccttcttaaatggaagggcacaagcgttaatttcacttaattcagcacaatcttcgtacaagacgcttaagaaattcgctgatgggttgtcgggacagatatgataacattcctgttttatactctgaagcgcacaacactcacaggcaagatcgtccggtttacaatcatctaatttcgacaatacttcgttgcagcaagctgataacttgatgagatcattcggtgggcacttcttggatggcctagggttgggattgacgtaggatccaaattcggattcgtataagttgctgttgattgaatattttgcagcaacaaccagagagaatgcggcggcaacgccaatcgcagaaacagttgtctgaaacttcatagtgcacacttatatctttgagggatcttttttgtaggtggagagagttgtgttgctgtagtgaactcttataatgtgaaatacactaagaatattgcaacaattattggccccaaattcttagcgctgaactaaaaataaggttgaatacacgcgcgaatttggaatccacagatcatcaggcgaggactattctgccttagagctacgtggacaaagaaatcagacatttaccagggcagagattcacaaggctccgctttatttctctttggaatgatcatagttgccctgatgtatgtgtagtagtacagtgaagactcttgattttccaaatccagttggcccaatctgtatttgtataaagtatgattttgtgaaatttaatggtggtcaaaattcttggcttaaacatcgaaattggttgagtgcacaatttcgtgtctgatagttaccaaatgccaaagcttttgaaccatagagtgaagtttttccagaggtattttgtcgcatgaaataatcgttggttggggcttgcgccaaacggctttaccccgaatgttgtacctgcgcgaataaaccgtgagattctccggtaaaagttcgaagccctgaaattacgcgacgaaaacttccaagcctgtaccaatgttctattttgcaattgtttcccaaaaaaaaaagtttcgagcccagaacttttcttgttgattccactttgaatataccaagctaaaacggaatcgagtctgttttcgtgtaccaactctattcgccggtgttttggtgtacagcctccttttcaccaggaattctgtatgtaatcttggaaagcggcatcatttctactcgtgtcatgaagttgtaaaatttataaatacccagctttgtccaggatggatatagttgaatacattcgaaatctagcccttcacatattaaaaggagaatgaacttcgcgattgtttcaatctttgtacttttcgtctttcaatcggcttttgctgatgacaaaactacccctcctgtggaagttgtgggtaacaaattttacttttcaaacaatggttctcaattcttaatgagagggatcgcctaccagcaaaacacagccaattcaactgaaaatttgctgttcattgatcctcttgctgacgagaagacttgcgaaagagacgtcaagtatttcaaagaattgaacacaaatactttgagagtttatgctgtaaatgggtcattagaccatgatgcatgtatggatattttctcagaagccggtatttatattattgctgatttatcagaaccagatctttcaattaatagaaacaatccagaatggaatcttgatttgtacaagagatacacagaggttgtcgacatgtttgaaaagtatccaaatgtgttgggattttttgctggaaacgaagttacaaatgataaatccaatactgatgcatctgcgtttgttaaagctgctgttagagacactaagaaatacatcaaagacaaacaatacagaaatatacctgtcggatactcatcaaacgatgacgaagatattagagttgcaattgctgattactttgcctgtggtgatttagacgagagggctgacttctttgggataaacatgtacgaatggtgtggagagtctacttttaagacttcgggttacctggatagaactgacgagtataagaatttgactattcctgtgtttttctcagaatacggttgtaatgaaaagagaccaagaaaattcacagaagttggtgccatcttcagtgatgacatgactgatgtatggtctggtggaattgtctacatgtactttgaagagcaaaataaatatggtcttgtttcaattaaaggggatgaggtacaaacccttgatgactacaaatactacaaaagtgagattaacaacatcagccccaactatgctaaatcatctactgcctcagtggaagccacccaaacatttgcatgcccggcttctgcctcaacttggagagcagcagtcaaattgcccccaactcccgacgaagacttctgcgaatgtatggctctgacttatgaatgtgttattagagataatgttccgcagaagaatttcaagaatttgtactccgaaatttgcggccaaattgactgttctccaatttctgtaaatggtagtaaaggtgagtacggaagcgtgtctttttgctcggacaaggataagttgtctcacgttttaaatgagtattacctcagttcagacagacacctgtcggcttgtgactttaatggttctgctacccttgccaagagtgttgaaacaggcaagacatgtagcgccaaggatggatctgttaactctgcgggcagttccaattccaagagttcggatactagccaatctacttcgacatctacgaaaagttcaggagccattcaaagtttccagattgcttccaagtatgatttgttggcaatatctatatttatgggatgcctcttcagtggcgcaacaatattattcatttaagtgctgttgtatttggtctattccgcttgatcatttgatatacaatatgactatactgaagaattcttgactaaagataaataaacttctaatataggttcaaatatcactctatatgtactacatgattaatttaattagcaatcatgaagatttcgttaagcgctttagcatccatgaccgacgcacgcttttgcttgatccacttagatctagcagcaagtctagtggagataggttgttcttctgagacgctaggtgcaagttccgaagaattttttactttattttgcatcgactccttcttctctttcttctccttcttctctttcttctctttctttactcttctttccttgttgtctttcgtgacattcttttctttcttttctttcttttcttttctgttctttctttctttcttcacttccttttctttcttcttttttcttttcattgtcacattatcatcgccaaaggattttctcttcttgggtatactaacttctataagggtagctgaagtagacataactttctgcgtctttgtgtcccacgtacttcttagaacttccccttttacaaaatgcattccccattttccgtttatgatcttatcttttctttgtctttcaagttcactgttgatcttttcttctttaccattgagtcgacccaaaattcgttgaaaaacgtcaagccctgcactgtcattgtctatttcatctttaccatttttcttagctaaccttgctcctaaaccaagattatcgccctttatagtaaccttcacgtgtgaagtcatcgcatggtctacaagtcccaaacccttcccaggctgccatcccatcttctctaggtattgatgtccaaatcgattcgtatcatttgaccaatttgtattacgaggatccaacccgaatctttgcttcacctttgtgccggctaaccccattgttttgctaatgaaagtactactctattctacaacaaatctaatacgcaaaaaatgggataccatccttttccataaagatgagtatcctgcatattgtgatatttctttttatgttccctagttcaactagaatcccaagatagaataccacccagacaggacccatagtccttcatcttcacctcttgttacacaattactttcaacaagccactttataactgactcgtaatctctgacgcctaaaacggtatgtagcttgtaatgcaaagctgcataaggaatacctggccgaaaatgtatatagtaaagaactgccaaaatgattctcttccaattattatcattaatatttccattaagatcaatccagaagtgtgaacaggccctcccagttggtacatgtacctttgaggttcttccagctcttatatttttcttgccatgatgcacaactatatcacaagaaagtttctctttgtctatcaatctagattcatatccatcgaatttatacgatttatcgatgtgtaccaaagaagccacctcatttgagattaaatgaagcaaagaacatacttgtccaccaagtattccttgtgatagaatgatacctttccttgcatggaatatctcagaaagattatcttcaaatttggtagcttgatttagaaatttcagagtgattttgacagaaagagcattgtagactctatcagttagaacgaatctatcactggagccatcagttgcataaaagtacacttctttatcctttattaaagcagttgaagctttgtatgtgatgtcatcaccaaattcagaaagtattttcttaacttgggcttgagagaaattttcttctgcagttgcaaacattgcctttagaatagttctaatttcatcgttttcctttctctctaacttgtactccctgcggaaaaaagttactccagataaaatggattccttttggcgcattgaattgtcttctagttgatcatacaaattcagcagcgattcagaaacctgaactttgctataggcggaagaattttctttcttggttcgaaacaagggcattttatcctctatgtctaatacagatccatctgaatctttccataagtctaaaaagaatttgaatttaatattctccaaatcttcagaggacaccaaatcatcttcaattcccttctggatgatgtgctcaaatgcctctattccctttgctacagcggctaacccaccgaccagctttctaacaaccgtccacttctgctttacacttttcccatccatatcatcaaataacgaggcaattgcatcaaaatcaatcgagcctctcatgaatgtcttagagatgacaatagccctaaataaagttgtagcatctgacttgtcaaacttggaacttgatttataccttctaggagatctagatattgttccttcgttgattcttttgtttggctttgatcttctacggtgcttcttggatgcaagtttgggcaatgtaacatcaatttgaattgggacctcactagagtcgaacgcattagtcagatctttcttcgcaggttttcttctaggtggctttgaaaattcatcggcctgtcccaatgattccaatcttccttctcgttgtctcattttcctcaaacctgttgacagaaataatgttacttcactttctataattcttctagatttttgatttctattctcaccaacatcggatatgcattggtctttggcaagctgaatttgctcagaagagggtctatactcttcctctgttaaaatcaaaagctttctcgtgatttgttgccctgtcttacaaaatgcgattgtttccacatccaagtcctttgaagctataagactcgaaatgtccctagctaaggtcttgatatcagttgcagttgaatttccaagacgcttgtccaataaacgacgcaattttgctgtggtataagtaactcctcccaactcctttattatctctagcaattcagttctcctttttccccctttcaatgatgaagtaaccgacctcttattattagtatttctgagttttggaaaaacagcttcaaaaattggtgcaattggtttaagactgtctattgtgacacctccagtttgttgaatatcatcttcaacctctatggctgcttcatcgacaacattttcttgttcttcgtaattgactctttcacgctttcttgctttccgactgcttcttgtgttatcttctatcttttttctttttaaatgcctgacttctggagcggtattaattctttttcgtagtaccattaaatcaccttttggaatttttcctagtttatcgtaattcttatcattcaattttaataaggacaatttggaaataataccgttattcttttgagatttatgttctttcacgtctgatgacttgaattctcctcttgtgaagtacctgtatagcttgaatttgccttcataatcatatgagcgaactaaggaaagatcgtcgtaaagatccttgtagctctttaatggtagtagcatatgatcgtcaaccacataacttgctagagaatctagtactctcgtaaagggccggtatccagaaatacctgcaaggttccttacaatctccttggatgtttgtcctgagtcctgagatgaaacaatattctgcaatacctgatttgacaaaggaaaaaagttattcaaatgcgggacttcttgagcttcatgattatcagctactggtttatcttcaatgaaattggactcctcgtcaacattcgagtcaatagaattaaaaacttcgacataatcagttaagtcacagatatccttaggcaaatctttgacgtatctaatagaatatactaattgatcatcttctggaatcttgaccattaacttctctacatatccattcttatgaagatattctacgatcgcgccaaaaaactttccagacgattttgttttgtccattttcaattctttctttaagtccttgaagcttctcaaattatttggggccagtttaactgaacttacaatcaattgtcgaagtttgaacgcattcttatgggtctgctcctcggaagtttcagtatgatgccactgtccagaaaacttagaatgaacgcacaagcttgtatgctgccgtgacttttcatcgtatacattctttctgacaatgaagccacattcttctagctttttgaatcgcaatggtagcgatctagggtcttggccagtagccttacacaaatcaggggaaagtattccagatattccatacttcgcgatttcacatagtaactcaaagggtttttctccaagcagaactcttgccttcttagatggttccaaaccagtcaaatacctccattgtgtatctgatgtaaccaatattcgaattttattttctccaccttcatactcaacaaaagccttatagtcaggtaaaattgtcaatggttcatcaccacgagtaacatatagtagaaggggggtattgtcatcgttgctgaagaatagccattgccaaataatttgtttttgaaaatcatcaagaacattaaattgaagcttggaagtcatatagtcccataattctatcaaagtcaaaccattttgaccagaaaatgacaacttatcgagaattccagaaactaattcagatggaggactattaaacagcattggtggtgctttgttgctattttgaagtaagatccctttgtaattgtttccgaattgtagggtcttatcttgtttttatacgacaatgtcgtcaaatgtcgcatttagagacaatcatcatatttttcagaaaagtttgtcatatcgtcatcaggtacttcaataaccatatttataaaatggaatctgatgacgaacctttgacgttgtcagcacatgcattggcagctttagctcagttcaaaaacgaagaaaaagagagacttgaccaatttgagtcattatacaacaaatcagaacaacaatttgatgaaaatcagaaagttgtctccatagatgccttcaaggaggattggcagctttcccaattttggtatgcggattctacagcggtaacacttggcaaggcactcttagaaggggcagataaggatactgttgtagttattgcaagtgcaccttctgtatacgctgcgattaaatcttttgcacccgaagatttgcctacagaaaatatatatttgttagagtttgatgacagatttcgattacttgcgggctcatctcacttcagtgtctatgactacaactaccctgaaaagataccacctcatctcagaaataaatgtcatagacttttaattgatcctccattcctagaagaagaatgtcaaacaaagtctgcgatcgcagcaagaaatctcctagttgctgataaaggtgagaagactgcttcaggcgatctcaaatacaaacttatttcatcaactggtgagagaatgaaagacatagtgaaaagtaactatcctgaaacagatcttaccgatttcttaccagaacataagaatggtctcagcaatgaattcagatgctatgccagttttgaatgcaagtactggaagttccaaactagttaggtgtgcctatataactctacataactaatagctagaaatacgtccttctgaagagactcaacttgtaacttccgaggtattgattatcaccctcggagggttagcacattcgcactcacaagcatgtactttacccggccaccactattctgaaattaactactaatatcaagggtgcgcgtaatttctatctctcatgcagttgagccctaacaaaattttctcttcacgtttttggacatcctcagcaaatgatgtgtttggatcgaaaaattttcttacttagtgtcgaccttttcagaggaagtcaattcaatttctttcaattttcatcttctatataagaatcaaacaaaatgtctttctcagacttcaccaacgcttctaccctaaagtcattgaacgaattcttagctgacaagtcttacgttgaagggtaagtataatttcagtacgatgggcgatgaccaaacgtggcaccgctaattggaggtcaattgaatcacaaatctttcttttcaaatctgtattctgaacataagaaacagctacataagatgaaagcaccctgagaataatttaatgatgatcgcaatctttggtccgtgtttatgaggtggattcaagacccaccgcatgagtgacaatgaagatttaaataaaaatccctgactagtattattcgaagttaatcaatgacccactttttgttaattcaaaatactaacaacccatttagtacttctgcttcccaagctgacgttacagtctacaaggctttccagaaggaataccctcaattttccagatggttcaaccacattgcttcttttgctgacgaattcgaagacttgccagccggtaaggctccagctgcttcagctgccgaagaagatgacgatgatgtcgacttgtttggttctgatgatgatgaagttgatgaagaagccgaaaagttgaagcaacaaagattggccgaatacgctgctaagaaggctgctaagggaccaaagccagctgctaagtctcttgttactttggatgtcaagccatgggatgatgaaaccaacatggacgaattattggaaaacgttaagtctattgaacaagatggtttggtttggggtgctcaccaattcatcccagttggttacggtgtcaagaagttgcaaattaacttggttgttgaagatgacaaggtctcattggacgaacttcaagccacaattgaagaagatgaagaccacgttcaatccactgacattgctgctatgtctaaattgtaatcgaatctctattgtatagagaaactgtttgttaatatatgacaaattgattagttcgtaatgaatacaagataattgaagatctattctaaatctataaaggtagataatccactcccttatctaaccactgagttaagaactcttcttgacttaattcagtttcccataccttttgaactatctctttcaaagaaaaaagtgttcccatttgagcgttcttgtacaacgtttccatgaagtgcatgagattggctctttcttctgcacttttgcattcgcatcccactgcataaattggccaaaccatctgcgttatcatgggtgaaactgggtccatcgaaccgtatacactaataaactcatcgactaatttcttatttgagttctgaaatcctgttggttgaatgaccctattcaaagttatccacactgctatagaccagcattgagcacattttaatcttgtagtgtaatcttctccaccatcactataaaggacgtagtctctataatttatgagttctacttttattacttcgtattcctttagaaccttttcggtactcttctcagtcccatttctaacgtcgtgacgcaaataacataccttagacatggctctgaaaatctccccggggcatcccatcattttggaagttgatataatgtcataagacgttccataccacgtcggagagcaatatggtaaccggcagtcgggactgacaattgcactcacagtatcataccaggagagaacgaccactagtgatctctttttttcgttatccataagcaccctataaaatccagcgtcttggcaaattgatgcaaataccttgtaaaaaaatcttgccaaggaactcttccctttctcaaggacagcaaacaaaatatgaacattaatcaagactagtattacaaaagaacttatttgctttttcttattgtccgtctgcgaaccatcaactgactccctattagtaccaatgtatcggatcaagtgatccattgtattattgatatgagccatacctttgcgataatactcacttcctccctttctactttcatacatgtggatgcacgctaacgatatgaagcaacttcttgcgatatcgaaatcacaatactttaatgctagatccggccaaggagagttaggatgagcatcgagcaatggcaaaagctttttaaagaaatgcttcaacatcatgttctcctcttgataagttagagaatagtcatctctagcttcattgccctctcgattgcttgtgatgatatctctagagaattcgtttgatttgtccatgaaatcgatcatttcattatttatgttcatatttccttcatttactgaatggctgcttgaaaacgaaattgggttgggtgtatgtatcctagaatttgcattcacaaaattggcaacgtctggagcattaagaagcaactctaaatcttcaaaaagctcagagctgaattgttcgagattcgagctcgaagacctggacttcgcattgaaagagagaattggcgaaggtgttcctctagaagttaattcatctcttattgattcagaatagttcatagaagaggtagcactgttaatcagtgtactagaagtaggagtatccgcaattggatcagcagttggctgagctgttcccgactgtgaggcttgaattgccatattaactcgcggctttccgataaaagcaatcctagatttgtccttcttactccaatttcgagaatcatctacgtcaaacgatagtcgaataccatagccttcgcattttctatttgtcttcaaacaattgttacagtatggttttccttcgtcgcattttctgtgtctagacgtagtcagtaaaaagtaattgcgttatactactacacgataacatacctctttttgcaggtccagcaacctgtccttactcgtgtgatcttccccattgatgttattgtattagtaggttcgttatgctagtcaacaattctcaaaaacgttatattgaactaggtcgtgcttcacccaaaagagaccatagattgatagaaaatcccataacagagaaccataaatggtattctgttccattgctcagaaaggcttcaatttaaatgtcttcgaatggttgatttttgcactaaaatgtaaaagttctgctgatattctttccgatcacttttcaactgaatataaacgtctcactctcagacccatttgatgaatccgcaataattgcagccaagtaatagcaccatatccatttcggtgagtctttatacatacgaaaaatcatatttgtgaaaatctgaccgctacatcttgagcaaagtgcgttaacaacagtggttgatgaacttggcaaaaacattaggcatgggaaagagaataatttcccaaactattagtagttgctctagaagagttgactgaatctctgttaaaagatctcatcccaaagaaatttcgaacaaagttgcgtttaatttatggatgcaatattcttggcatacaagtagatctagattgagatcggtcacactacggttctttggattcagattggaaaatttacctctattcgatttgttcggcatcgtgtcgagaaaagggttcttctaattctttgcccgttggcccaatttacgtatcccttcctctctgctccttcgtcactctttatgagattttgtggagtggagtgaaggtgcacaaattggtgacgaagaaaaagcaggaagttcaattcttttaacctactcattgcacacataaatctctattttttatccagcagataattcaaaactgttaggtttttttgaaagcgattcatttagcaaattgaagtcgtcttgattcgacacaagctttgtctctcgaaacacatgagggtattatctcaacatttcgaggccatgagaacagctgcttcatcgtacttcgctccttaacggtcatttcataggttggagaaaggaaaaaaagtattaacatcagtaataaagtctgtaaattcttcaaaacggaagagtgacattgtacttagtcatgagctaatattgatataatcgatcgacaaaagttcaaaaactaaataatactattctaattgtctggagaacataatggagctcttgcaatatctgttgtggaaaggaattcaaactcaattggtatttccacttcaccagtattttttggcaagatttaccgtcctagcaattagaaagcaatttgaaaacttttttttcggcttggaaattttgtgcccacttttataaagtttgatgttagtcccgtagaactattgcatatcattagttgaaaatgtggttcctgttgtaatctaaactacggggaatctacgcaatactgtttacaaacatacacacttggagttaccactaacagaaatacatggtgcatccaaaacaattctgtgattaagtacttgtggcaacaagagcgacaagtattgagcagactgttggaattgatattacatcattgaaaatatagttagctcttgattaagtaactttatagtttgagggacatggaacatctagtttatttataatgttgttctaggaccttaacctcaaccccttccataatcatttatttaaccattcacatgaacaatgtaaatcttgtaatctctagggtaatcatcagtttgcaaccaaaactgcagacagtacactgaagacattttcatcaatttagcatccggcattaatccatttgatgacaattataagaaagagttctctattgggaaatccctttgtccataagtaatttggtcaacatggagttgacatactcacccccatttccagtgcgaagactaccggcacgacacgacacctaagggtaggaggatcttgggaaagtgaggaccggaaacttcaaagtgaaggagctgcaagggagctatgatagcagtatcggcagaagacttaggaagacgacgagtgcgctttacgaaacttcaacgttcatatgctgcaggcataagaaatcatcatctgaatgatattgagagatgattgtcttttccaacgctgcatgagggctacccaagctttcattgatgaactgtttgctttggaagctccttagattaaatcagattgtctaaattcttgtgaagataatgtgttagaacttatttaagataaataatttccatatatatgaagaaaagttatagaaacttataaaggagaaggggaagaaggaccccctaaatagattacaaatccaaccatcggttgacgccatattacgatgaaataaggcgagagcgatttcagattagttgatcgtaattgtttctcattggaagatgtatcttatcatcttaatgtgtggcacatttaagtcgaaatggctgcaaatcctgcacatataaaatttgagcattggattaaaaagagtattgaagaaagatcccttcatattcaatattagcaaattcaacacagaaacgcacaacgacattgagtgagaccaggagttgagccagaatagaaggaaatgtgtgtgatccaccacctccaccaccaccaaggggagtatacaaagaggaggaagacttcacacgtccggcaaatggaaacacattttcatggaatcgaacatgatgtgaggtaatcacttgattcgttacaaaatcataaataagatgtccttttccaaaggtaccggttccgagatcaacacccatggccctggcccgagagaccaacttcagttgacgatgattgggtagaacattcacaaaggcagcacacccaaacactttgagttgagataagataggccccgcgtcatgccagagttcaaatggagaacgactacggagaaaaggagttagtaactggtttaggagaaatgaagattgatggagtacatgcgggaaaagcagcgaaggaagggagcacgtagtgatcatggtacgcgttttatcaagaacggagcgaatcgctctttcagcacgtcttgcgaatcacccgagtgctcttggagctaagacatgcttcacatgaaatcgagtcgtgaacaaccgtgcgaggcatgttcggatatttcaaggccagtcgaacgacagtaggagaggggtggccaaggcgagcatgaacaagagcagaggcagaaacaggtgccacaccagcgtccgcagcaggagcagcgaccgtaacaggagcgggggccgagtaggcagagtggttagcccgcgagacagtcgaggggcggacaattttgagacacagcaagtaaagatttctcaggtctctggtagcaagttggccatacttaaggcgaacaatgtcatcatgagagataacaagtttgtcgcccgtagtagtaacagccaggatggaaagaagattctgagtacagtcaggaacataaagaacgttaaagacacgaatcttctgaccttggagatcaaacacaagagtaccacgaccggcaatcgagagaggttcttcgtgacagaaccagagaaagacttctcttgttacaaatgtgggtagaagcacctgaatcaaaaataaagctggcagaggaagaagaagccaagagagcatagtgggtgtgttgaacataatgggcatagtatgaagtaggataatcgaaaccataacccagatacagatcaaattaatcaacatcagcaagcccataatgcgccaagagatgttagacgagaaccatgttttctgcgatttgttgagccacctgggaaacgatgtgccatatgaggaacttaactttcacgaaaaggagaggtgcaggaattcgccgtatgaccacacccatagcaattgtagcagtcaatattccacaccgggtcattaccttttgctctcgtcatgttgcgagtaacctgacgacggccagatggagaaggcgttattgcatacccagattgagacgaggacagtacaagcaaggcggaggatattgcaggtggggaaagctcatcatgataggtaaagaaattcaaaacttcgtccgccgtcacggtggcagtcagtccaacttgagaaaagaagagatctctcaccttggagttccctgtaccataaaggaagaggagcgctttcctggactcgtcattgtacttggccataaacgcagtcaacttttcagcaatcaataacccagcttcagtcgtaatggtcggatcagcaaggcgatcaaataagtacttgagatagccgaccgcatccctatagctggcgattgtgtacttggtttcgacagctttccaagtttccacccccagagggtattgttcaaacaacgcctgaacgtcaggctgttggaatgacattattcctttcctattacttgatgaagctagtctgtgtattagtattaagtacttcagatgactatagacaatttctataaacagggaatttcctgtagaatttatacaaaattctctgtatgtagattttgtgtcgatgagacgggagaaaatgtttaaatttcaaagaattgaaactgtaattgcagatgactatgtgcagtactatatacaaatttacaaataaggaagttccactggtcctacctctgagaataggagtaaccccacaccagatccgcctcaacggaatagaacttatccgtaatgaaattggagacgggctaaagataagaataagaataagggggaagataatgggttctgaacaatataaatatgataggatattctccaatatcagaagaaaaatcagaacttgaaattgaacttcattatcaagagttaactatatctttattaatatgcaatgtctaattttcaacagaaaacttttcatctctaaaccagacattgcttgacaccaacattctgttttaccccttatagttacttgaacttgttgaaactcattgggatatgatggtctatagttcatatggaccgtcttaatggactatctatttgtaccttgtctgtcttcttccgttaccttgatacaactgtctaggcaaggcacgcaacttgcctatatgcatatagaatatcctgcaattattcaatatatttttttctacatctctaaaataacctccctcaaatgaatcataaattgattaacttatttaagatagataatttccatatacaagaaaaaaagttatagaaagttagaaaggagaagggggagtaagacccccttaaatagattccaatcctaccataggccgacgccacattaggatgaaatgaggcaagattagcaatttcagattaattaaacataatcgtttcttattggtagatgatatcaacatctttatgtgtggcacaattatgtctaaatggctgcaaatcctgcacttgtaaagttaacgcattggattaaaaatagtatagaatatgcctttaggtttgatatcagcatattcaacatccccccttaatccaatggtcattttattatgttagttccattcttgatagttcgattaacttgttggaaggctacccgtggtagtccttttgtaaacatgtcttcaacgttgtcggcagatttgatttggcgaagtttgacaatattgtctatgattttgccacggatgaagcgatagcaatatctatgtgtttcgtacgttcgtggtgtacaggatgttcgctgagtttgatacacgaggtgttatcttcccaaatcattattggtagtgatattgggatgtgaagttctctgaagaatgttattagccagataacttctttgataactgtggcgagggccatgtactcagcttcagtggtcgacaatgctgtggtggtttgtttcttggatttccaagagattaggcttcccccatacttgatggcatacccactgattgatttcctgtcactgctatcacttccccagtctgagtcaacaaacacttgtagatcgtttatgtttgtgtagtgctgaccaagtttctgtgttccctttagatagcggagaacatgtttggcggcagttagagttacctctgttggttcgttgaggtaccgacttaacattccaacaatatacgcaatatcacctcgaatggtattgctagcgtaaagaagctttcctactatgcttctgtaaattgttgcatcgcagggtttggatttctggtttagatgctgtccctgaataataggacttttcacgctgttgagctcttcaagatttaattcctccaacgttttcttgatggagtcagaaagatttgctgtgatcccatcagggccctgttctatgttgattcctaggaatttgcgtgccaatccaagatccttcatcttgaacttgttcaggagaagtttcttaacttcgtagatttcattaaggtaccggagcagaagaaggtaccggagtaggagaaggtaccagaataggagaaggcaccggcgtaggagtcgacggaggctgcgacagaggagtagtagatgcagcaggagagaccggtgccgaaacagacgacagagctgcagatgaacctggcgattgagcaacagtactgccagatggcgtggatggaggcgaaggagatgggggcagagacacacgaggaccctgagtgaggcctggagcaggtgccagaatagaagggaaacttccaccaccactacctccaccaccaatggaggtagccgacacagcagtagacgtcagaggtctagcaaaaggaaagacattttcctggaaccgaacatgagaagaggtaatcacttgtctggtagcgagatcataaacaagatgagctttccgaaacggatcagatccaagataaacacccttgattgcacgagcgaccaacttcagttgacggtgattgggtggaacattcacaaaggcagcacacccaaacactttaagttgagataagataggcctcgcgccatgccagagttcaaatggcgagcgattttggagaacaggtgttggtagcctgtttaggagaaatgcagcatgttggagtgcatgcgggaagaggtgcgaaggaagagagctcgcagtgatcatggtacgcgttttatcaagaacggagcgaatcgctctttcagcacgtccattttgatgtgagttaccaggcacagtgagctgggtctggataccttctgccgcaaagaatgaagtaagcgtcagattgacaaactcacctccattgtcagaacgaaagttacagacacggtagccaccacgactggagaagtgttttgtccatgccttaataactttgataatgaagtccgcagcatccgatttcttgagaagagggccaacagccttgaagcgagtaaagtcgtcaagaagaatacaaaaataaaacaacgaggagggaccaccggcatgaggaccggacaaatcacagtgaagaagttgcaagggagcagatgtgactgggccggtggtcgttttgggaataacccgagtgctcttggagctaagacatgcttcacatgaaatcgagtcgtgaacagccgtgcgaggcatgttcggatatttcaaggccagacgaacgacagtcggagaagggtggccaaggcgagcatggacaagagcagaggcagaaattggtgccacaccagcgtccgcagcaggagcagcgaccgtaacaggagcgggggccgagtaggcagagtggttagcccgcgagacagtcgaggggcggacaattttgagacacagcaagtaaagatttctcaggtctctggtagcaagttggccatacttaaggcgaacaatgtcatcatgagagataacaagtttgtcgcccgtagtagtaacagccaggatggaaagaagattctgagtacagtcaggaacataaagaacgttaaagacccgaatcttctgaccatggagatcaaacacaagagtaccacgaccggcaatcgagagaggctcgtgaccggcgttcatgacagaaccagagtgaggaatgatgtcatggaagagacttctatcgttacaaatgtgggtagaagcacctgaatcaaaaataaagctggcagaggaagaagaagccaagagggcatagtgggtgtagtgagcgagatgagcatagtaagcaccaggttggtcaaaaccaaaagtcagagcatcatcagtgagagcataatgagcagcaggctttggacgagagccgtgcttcctgcggtgctttcctggaccgccaggaccgaagcgtgaggccatacgaggaacttcaccctcacgataaggagcagggcagttcttggccatgtgaccactgttgagattggaaatctagagtaatccaatagattgaagtttagttatataacaagaaactgagcgtgcaagaaactgcgaatgcaagaaataatatttcagaatagaagcattattcagaaacgcacaggttgcaaattaagccgcactgatgtgcaggcaactctgaggtataaaagaaagctgaaatcctcaaagtcttgaagaagtttatacgtttataattaatcaatttacgattcatttgagggaggttattctagagatgtagagaataacatattgaacgactgtaggatacgctgtatccatatagacaagttgcgcgccttgtctaaacagttgtatcaagatagagaagaagacagacaaattacaacatggatatgcaatcaagaggtctacataaactagagaccatcatatcaacaattcatatttcaataactagttttttgacaatccactgactgattctcgttagtgttgaactgtttgctttggaagctcagtagattgaatcggattgttcataatgtaggacagtatattgattaacttatttaagatagataatttccatatagaagaagaaaagttatagaaagttagaaaggagaagggggagtaagacccccttatatagatgccaaatacaatcacaggctgacccctcatcaggatgaaatgaaacgacatgaccagaatttcaggttagtcggacataattgattctcattggtagatgttatcttatcacattactgtgcacaattatgtctgaatggctgcaaatcctgcattcataaagtttacgcattggattaaaaatagaatatagaatatgcttttaggtttgatatcagcatattcaacagttagtcctgtttgaatagttgctattgttagtcacttgtgactatgctgctagtactgtaggaccatttactgtgggtgacgtgtaattacttcctgtcagctctatgtgaccatttgcagtagtcgttcccatctgtttactgcaagcaaataaggaagttccactggtcctatctctgagaataggagtaaccccttatcagacccgcctcaacggaatagaacttatccgtaatgaaattggaggcgggctagagataagaatagggggagataagaatatgaataagggggaagataaggggatctgaacaatataaatatggtaggatattctccaatatcagaagaataatcagaacttgaaattgaacttcattatcaagagttaactatatctttattaatatacaatgtctaatttttcaacaaatatctgttgaagttcagaagcattcatagtgtcttacgtgtaataattgttaacagtaaaggtagaacttgttgaaattcagagaattgaaactataattgtaatctaacaatcagataactatgtgcagtactggctgcaaatttacaaataaggaagttccactggtcctatctctgagaataggagtaaccccttatcagacccgcctcaacggaatagaacttatccgtaatgaaattggaggcgggctagagataagaatagggggagataagaatatgaataagggggaagataaggggttctgaacaatataaatatggtaggatattctccaatatcagaagaataatcagaacttgaaattgaacttcattatcaagagttaactatatctttattaatatacaatgtctaattttcaacaggttatgagccctgaagtcttccatcgctacggtcaccaccgctcccttacagttacttcactctgatgtttcaggtcctcacttcccgaaatcctcctaccctcctgagaagtactttcttattattgttgatgacttcaccaagttcaaatgggtaatccccattgcacagaagtccgaggtctccgctcaattgattcgacacatcaagctctttcattctttcttctccactcgtggtggataccgtgtcggtagtattcgtactgataacgggggtgagtatgtcaactccacgttgaccaaattccttcaggacgaagggatttctcatcagagaacggtgccttataattctcatcagaatggcaccgcagaacgtgctattcgtaccattcttgataaagcccgaactcttctgactcatggttcggtgcctgctgtgttctggccgtatgctgttgtctgtgctgcctatcttattaatcgtcaacccctgctccaagctccgttcgtgtctccgtatgagcgttggttccagatccgccccgttattgcgcatctccgtccttatggatgtgctgcttatgcccatatccctgaatctcaccgtccactgaagttttctgaaagggccatcactggggtgatgttaggttacgatggatctcgccatgcttatctcatctatgaaatgcactctcgcaaagttgtttgttctaatgctgttacgttcaacgaactgttgttcccctttgcttctctgcctggtctcccagttcccctgtctaccgtgtcttccgtgtctaccgtgtctatgcctatcctgtctatctctgtgtcccttcctgggggtgtgtctgccccacctattcctgttcgttctatgttgctgcctgtttctgatcttctgtctgatgatgtggccatggctgatgacgctgccatggctgatgacgataccattgttgataatggtaccgtaattgatgacgtcgtcctgcctgttgctagtaaactgcttgttgctagtaggctggctgatgatggtgccctggctgatgattcggccatgtccgatgattatgtcatggatgatgagactatgtctctcgcaccgataccatcttgttccgactacgactcgtgctattcttatgactcggatatttctcctgacgcggatgatgatgaaacccttcccatccagcctaccaccgtgatttctcctgtttctctgcgcgcttcttccaatgcttcttcacgtccgcaatgtcttgctggccctgcacctcctcttcttctcactcatgaatccaattctggggggaaacagattcagatccacagcaagtctcatgcatcgagaagaacttacgatacaccaaatatgaatcaggaagagataagtgagcgaaggctcactaaacataagcttacaccagttccctcttatgacaatgctgtggctcacaagaaggttagaattgaatacataagtgactacgaaggagattctcctgagtctttgaatgatgatccaaatgatgaagattaccaaatgtcagaagcaaatgtggtaattcgaggacatgcgttcacggctacaacaagtgttttaggtagccccaagattcccagaagctatagcgaagctgtcggaagccaagacgctgggaaatggatagaagcaatgaacgatgaaatgtctgcacatgaaatgaaccagacgtgggttcttgcagacaagccaaatgataaaacaaaagtgttaggtgtgagatgggtgtataccatcaaggatgatggtcgatacaaagcaagattagtcgcaagaggttttcaacagagatatggtgttgattacgaagaaacctttgctccagtaatcagaagtgagagtgtaaaggtgctactctccgtatctgctgtgtatgggatgaaagttcatcagatggatgtaacgacagcattcctaaatggaaaaatcgatttaccaatattcatgaatcaaccagatggattcaagcatacaaatgaacttgggaaagtatgcaaactcaacaagtcactctatggtctaaagcaagctccgttgatatggaacaagacaataaatgcgtttctcgagaaggtggggtttgttaggtcacaagctgaattcggattatacaaaagaaagaacactattgtcggtttatatgtggatgacctattgatagcaagcagtaatgaaaatgagatcaaggctatcaaagaattgttgaagaaggaattcaaaatgaaagacctcggcattgcacagaaattccttggaataaacatacagcaatcagaaaaaggtattagagcccatttgggagactacattgacaaaatcttggaggaattctcaatgcaagattgcaacccagttggaactgcagcaattccaaatgctcagttagataaagatgaaaccaagattcttgccaatcctacaatttacagatccattgttggcaagttattatatgctagtaacaccattcggggagatattagcttcattactggcatgctcagccggtactttcagaatcctagagagggacatctagtagcagctaagcatgtacttcggtacctaaaaggaacaaagactgtgggccaggtatatggaaaactggataaattcgaggtgtacgttgatgcagattggggttcttcgctgtcagatagaaaatcaataacaggatatgcaattaagttcggaggaagtctaatctcgtggaaatcaaagaaacaaccaacagttgcactatctacaacagaagccgagtatatggcacttgctgaagcagttaaggaggtcctctggttggtgactctatttaaagaattggaaatccctgtaacccttccaattatagtacatgaagataatacgtcatgtattaacttaacgaatcatccaacaactcatcaacgtacaaaacacattgatatcagatatcactttataagagagcaggtacagaaagaattgatcaaggttgtccaagttcagtcaacaaataatatcgcggacatctttacgaaggcagttcccaagccattactccagcaactacgaaactcagcaggaatgatggatattgaataatccgattattagattatggggggatgttgaaattcagagaattgaaactataattgtaatctaacaatcagataactatgtgcagtactggctgcaaatttacaaataaggaagttccactggtcctatctctgagaataggagtaaccccttatcagacccgcctcaacggaatagaacttatccgtaatgaaattggaggcgggctagagataagaatagggggagataagaatatgaataagggggaagataaggggatctgaacaatataaatatggtaggatattctccaatatcagaagaataatcagaacttgaaattgaacttcattatcaagagttaactatatctttattaatatacaatgtctaattttcaacagaacttgtaagttgttctcgttatcgttattaaaacattaagaaagtctatctaactctgagaggataccacccttatttatggtgttgtctcacattcacatgctccacggattcttgttctcatgtttcacatttgtttcatagctgtggtattgaaacctttctccacatctatttccgtatgtccgtgtggggttctattatcctctctgtatacctgccattgtgttttctattaccaccatatccttattatgatatatgaatggctctcacaagagttgcagccaaatctattagataatcaatatccggtatctacgatattttctagatcatgcatattcatgcattatcaaactttatctaataccggatttcaacaacagagaggtacgggacgacaggaaatgtccagtacgaacaggagaaggacagctagtggccttgtggccattaccaagacaattggtacacttgagaacaggggaagtacaaacattcgaacggtggcccttaccagagcacgtatagcaacgggtattccagataggagaggtggcaggagctttctggtgagacttcagtccagcagaggagagagtagtcaccgtgaacacagacccaggcgtggaagacagtgaggcatcgatccgttttaggaacgatttgaggtcagtgagatccaaggtagcaccaagttccttgaacttagacaaaatatggtccagcttacagtgtgtaagatagaggagaccaggaatgtcagtaggaggctgctcagcaaagtaggtagaaagcagcttggcagccgataactgaacagtagtactgaccgacgtgtcactaatcttagcgaccaaaccagtaacgtactcgaccttctcagagtacgtcataacccaataattgacgtggatagcctcccaaagagcctgaccagaaagattctcggcaagaagagaatcaacaatctctttagacaccgtcttgtcaataagcagctgaagcgtcaggttaaaaagaataaacaacgaagcctcggtaggtggttcagatttttcaatgaaaccccggaactccataccaagagtcccaatagtgacctccatacgcgtacgccattcacgatagttgaaacgcgaaactagtttctgggagtcatcaaacttgatgtttgagacggattggctcataacctgttgaaaattagacattgtatattaataaagatatagttaactcttgataatgaagttcaatttcaagttctgattattctgttgaactgtttgctttggaagctcagtagattgaatcggattgttcataatgtaggacagtatattgattaacttatttaagatagataatttccatatagaagaagaaaagttatagaaagttagaaaggagaagggggagtaagacccccttatatagatgccaaatacaatcacaggctgacccctcatcaggatgaaatgaaacgacatgaccagaatttcaggttagtcggacataattgattctcattggtagatgttatcttatcacattactgtgcacaattatgtctgaatggctgcaaatcctgcattcataaagtttacgcattggattaaaaatagaatatagaatatgcttttaggtttgatatcagcatattcaacatccccccttaatccaatggtcattttattgggttagttgcattcctgatagttggattaagtgttggaaggttcctggagttagtccttttgtaaacatatctgcaacgttgtcggcagatttgatttggcgaagtttgacaatattgtctatgattttgtcacggataaagtgatagcgaatatctatgtgtttcgtacgttcgtggtgtacaggatgttcgctgagtttgatacacgaggtgttatcttcccaaatcattattggtagtgatattgggattcgaagttctctgaagaatgttattagccagataacttcttttataacggttgcgagggccatgtactcagcttcagtggttgacaatgctgtggtggtttgtttcttggatttccaagagattaggcttcccccatacttgatggcatacccactgattgatttcctgtcactgctatcacttccccagtctgagtcaacaaacacttgtagatcgtttatgtttgtgtagtgctgaccgagtttctgtgttccttttagatagcggagaacatgtttggcggcagttagagttacctctgttggttcgttgaagtaccgacttaacattccaacaatataagcaatatcacctcgtatggtattgctagcataaagaagctttcctactatgcttctgtaaattgttgcatcgcagggtttggatttctggtttagatgctgtccctgaataataggacttttcacgctgttgagctcttcaagatttagttcctccaacgttttcttgatgtagtcagaaagatttgctgtgatcccttcagggccctgttctatgttgattcctaggaatttgcgtgccaatccaagatccttcatcttgaacttgttcaggagaagtttcttggcctcgtagatttcattttctcgaggactcgcaataagtaggtcatcaacgtaaaggccaagaatcacattatttcttctgtagatcccgaactcggattttgatcgaataaagccgttattctccaagaatttattaatagtcgagttccagatcaatggagcttgttttagaccgtagagtgatttgttcaacttacaaaccatatgtggatattgttcatccatgaaacctttaggctgcttaatgtagagttctgtgtcaatcttcccatttaggaaggccgtcgagacgtccatctgatgaatcttcatcttatgtacagccgctatggctagtagaagtttgatactttcactcctgatcacaggcgcaaaggtttcttcatagtcaattccatgtttttgtctaaaacctagagcaactagtctggctttgtaagttccatcatctttgatggtatatacccacttcattcctagggctcgttttcccttaggaagctcagcaagagtccacgtggagttttccatttgagcaccaaattccttgttcatagcttcaatccatcgttctcgttgaggactgttagtggcttcctcataggtgcgtggcacttgtggagtcattatggtgaccataaatgcactgctacccataatgagaggttggccatgtgtttcagtatagtcgagatcgttgggattgtctgcttctgaaaacgattcactatcggtggtgatgtactcaatttgttgtctctgtggatagttgatcaaattttgattgtcctgttgtctctgtgaccgtgttggaacaagtattggtctgtgtgcccgcttgagtgtttgtggatgtgttccatcacgcgacggaaccggggtgagtttatgcttaaccccattcaccggaggaggacgcgatacaacaagatgagttagtttgttgttggcctcagaattcagagggaccaaggcacggtcagtcagcgataggatgagttccatcccccctgaagcaggcaactcaatgagacgagtaggagaaagacccggagggaggaggaattgctgaggacgagattgaagtgggggagaatcaggaacctcaataataggagaggattgtggagagtcggattgaacgacccgaggcagtggttgaggaggaggtggaggagtggaggacaccacagtctgcgtagtaggagtatgacgagtgagcggcagaggataagtggcggaggtgtcctccatttccatattagaagtaggacgaataagcggaaggggatccatgtcggaggcatcctccatttccgagtcatgataagaagaaaggtcatccgaatccatcaccacgatgtccatataggtggacggatctggatattcttcctgatccagcagaacatccatagaggagcgcgtggagatcaaaggtgacgaacggggatgagtaccgtattgctcaggagcatcgaagaattcctgatcagagaccacttccatgtcatagccatcttcagacataggttcaggctcagtatccgtagagtctatttccatgggtatggctgatgaagatccagggataggggatggagcctcaaccgcaggatgaggaagaccgagaggagcagtaggagcagatggtctattgcgaggaacaggaagaagggagggtactgtacgaggtgctggaagtgaaggtaccgtacgagtagaaggaagagatggcaccttacgagttgaaggaagggagggtaccttacgaggagcaggaagggatggtaccgtacgaggagcagtaagagttggtacctcacgagaagcaggagctgtataggagtcgtcagacagctcgtaggagtcagagggaggcagatcggacctctgagccagaacaacggcacgggatggtgcagttagggccgcagaagtagaaggtaccagagtatcagaaggtaccggagcagaagaaggtaccggagcagaagaaggtaccggagtagaagcaggagacggagtaggagaaggtaccagaataggagaaggcaccggtgtaggagtcgacggaggctgcgacagaggagtagtggatgcagcaggagagaccggtgccgaagcagacgacagagcggcagatgaacctggcgattgaacaacagtactgccagatggcgtcgatggaggcgagggagatggggccagagacacacgaggaccctgagtgaggcctggagcaggtgccagaatagaaggaaaactgccaccaccactacctccaccaccaatggaggtagccgatacaacagtagacgtcagaggtctagcaaaaggaaagacattttcttggaaccgaacatgagaagaggtaatcacttgtctggtagcgagatcataaacaagatgagccttccgaaacggatcagatccaagataaacacccttgattgcacgagcgaccaacttcagttgacggtgattaggtggaacattcacaaaggcagcacacccaaacactttaagttgagataagataggcctcgcgccatgccagagttcaaatggggagcgattttggagaacaggtgttggtagccggtttaggagaaatgcagcatgttggagtgcatgcgggaagagcggtgaaggaagagaacacgcagtgatcatggtacgcgttttgtcaagaacggagcgaatggctctttcagcacgtccattttggtgtgagttaccaggcacagtgagctgggtctggataccttctgccgcaaagaatgaagtaagcgtcagattgacaaactcacctccattgtcagaacgaaagttacagacacggtagccaccacgactggagaagtggtttgtccatgccttaataactttgataatgaagtccgcagcatccgatttcttgagaataggcccaacagccttgaagcgagtaaagtcgtcaagaagaatacaaaaataaaacaacgaggagggaccaccggcatgaggaccggataagtcacagtgaagaagttgcaagggagcagatgtgactgggccggtggtcgttttgggaataacccgagtgctcttggagcgaagacatgcttcacatgaaatcgagtcgtgaacagccgtgcgaggcatgttcggatatttcaaggccagacgaacgacagtcggagaagggtggccaaggcgagcatggacaagagcagaggcagaaataggtgccacaacagggtccgcagcaggagcagcgaccgtaacaggagcgggggccgagtaggcagagtggtcagcccgcgagacagtcgaggggcggacaatttcaagacacagcaagtaaagatttctcaggtctctggtagcaagttggccatacttggggtgaacaatatcatcatgagagataacaagcttgtcgcccgtagtagtaacagccaggatggaaagaagattctgagtacagtcaggaacgtaaagaacattgaacacccgaatcttctgaccatggagatcaaacacaagagtaccacgaccggcaatcgagagaggctcgtgaccggcgttcatgacagaaccagagtgaggaatgatgtcatggaagagacttctatcgttacaaatgtgggtagaagcacctgaatcaaaaataaagctggcagaggaagaagaagccaagagggcatagtgggtgtagtgagcgagatgagcatagtaagcaccaggttggtcaaaaccaaaagtcagagcatcatcagtgagagcataatgagcagcaggctttggacgagagccgtgcttcctgcggtgctttcctggaccgccaggaccgaagcgtgaggccatacgaggaacttcaccctcacgataaggagcagggcagttcttggccatgtgaccacacccatagcagttgtagcaatcaagctgccaaatcagatccgtacctttagccttgatcaagttcctggtgacaggacccgaaggtgaagacaaggacgtaagggcataagcagattgagacgaggacaggaccagcaaggcggaggacgtggcaggaggagaaagttcatcatgataagcaaagaaattgagaacttcgtccgcagtcaccgtgggagtcaggcgaacttgagaaaagaatagatctctcaccttggagtttcccgtaccataaaggaagaggagcgctttcatggagtcgttatcgtacttcgtcataaacgcagtcaacttttcagcaatcaagaacccagcttcagtcgtaatagtcggatcagcaaggcgaccaaatatgttgaactgtttgctttggaagctcagtagattgaatcggattgttcataatgtaggacagtatattgattaacttatttaagatagataatttccatatagaagaagaaaaagttatagaaagttagaaaggagaaggcggagtaagacccccttatatagatgccaaatacaatcacaggctgacccctcatcaggatgaaatgaaacgacatgaccagaatttcaggttagtcggacataattgattctcattggtagatgttatctcatcacattactgtgcacaattatgtctgaatggctgcaaatcctgcattcataaagtttacgcattggattaaaaatagaatatagaatatgcttttaggtttgatatcagcatattcaacatccccccttaatccaatggtcattttattgggttagttgcattcctgatagttggattaagtgttggaaggttcctggagttagtccttttgtaaacatatctgcaacgttgtcggcagatttgatttggcgaagtttgacaatattgtctatgattttgtcacggataaagtgatagcgaatatctatgtgtttcgtacgttcgtggtgtacaggatgttcgctgagtttgatacacgaggtgttatcttcccaaatcattattggtagtgatattgggattcgaagttctctgaagaatgttattagccagataacttcttttataacggttgcgagggccatgtactcagcttcagtggttgacaatgctgtggtggtttgtttcttggatttccaagagattaggcttcccccatacttgatggcatacccactgattgatttcctgtcactgctatcacttccccagtctgagtcaacaaacacttgtagatcgtttatgtttgtgtagtgctgaccgagtttctgtgttccttttagatagcggagaacatgtttggcggcagttagagttacctctgttggttcgttgaagtaccgacttaacattccaacaatatacgcaatatcacctcgtatggtattgctagcataaagaagctttcctactatgcttctgtaaattgttgcatcgcagggtttggatttctggtttagatgctgtccctgaataataggacttttcacgctgttgagctcttcaagatttagttcctccaacgttttcttgatgtagtcagaaagatttgctgtgatcccttcagggccctgttctatgttgattcctaggaatttgcgtgccaatccaagatccttcatcttgaacttgttcaggagaagtttcttggcctcgtagatttcattttctcgaggactcgcaataagtaggtcatcaacgtaaaggccaagaatcacattatttcttctgtagatcccgaactcggattttgatcgaataaagccgttattctccaagaatttattaatagtcgagttccagatcaatggagcttgttttagaccgtagagtgatttgttcaacttacaaaccatatgtggatattgttcatccatgaaacctttaggctgcttaatgtagagttctgtgtcaatcttcccatttaggaaggccgtcgagacgtccatctgatgaatcttcatcttatgtacagccgctatggctagtagaagtttgatactttcactcctgatcacaggcgcaaaggtttcttcatagtcaattccatgtttttgtctaaaacctagagcaactagtctggctttgtaagttccatcatctttgatggtatatacccacttcattcctagggctcgttttcccttaggaagctcagcaagagtccacgtggagttttccatttgagcaccaaattccttgttcatagcttcaatccatcgttctcgttgaggactgttagtggcttcctcataggtgcgtggcacttgtggagtcattatggtgaccataaatgcactgctacccataatgagaggttggccatgtgtttcagtatagtcgagatcgttgggattgtctgcttctgaaaacgattcactatcggtggtgatgtactcaatttgttgtctctgtggatagttgatcaaattttgattgtcctgttgtctctgtgaccgtgttggaacaagtattggtctgtgtgcccgcttgagtgtttgtggatgtgttccatcacgcgacggaaccggggtgagtttatgcttaaccccattcaccggaggaggacgcgatacaacaagatgagttagtttgttgttggcctcagaattcagagggaccaaggcacggtcagtcagcgataggatgagttccatcccccctgaagcaggcaactcaatgagacgagtaggagaaagacccggagggaggaggaattgctgaggacgagattgaagtgggggagaatcaggaacctcaataataggagaggattgtggagagtcggattgaacgacccgaggcagtggttgaggaggaggtggaggagtggaggacaccacagtctgcgtagtaggagtatgacgagtgagcggcagaggataagtggcggaggtgtcctccatttccatattagaagtaggacgaataagcggaaggggatccatgtcggaggcatcctccatttccgagtcatgataagaagaaaggtcatccgaatccatcaccacgatgtccatataggtggacggatctggatattcttcctgatccagcagaacatccatagaggagcgcgtggagatcaaaggtgacgaacggggatgagtaccgtattgctcaggagcatcgaagaattcctgatcagagaccacttccatgtcatagccatcttcagacataggttcaggctcagtatccgtagagtctatttccatgggtatggctgatgaagatccagggataggggatggagcctcaaccgcaggatgaggaagaccgagaggagcagtaggagcagatggtctattgcgaggaacaggaagaagggagggtactgtacgaggtgctggaagtgaaggtaccgtacgagtagaaggaagagatggcaccttacgagttgaaggaagggagggtaccttacgaggagcaggaagggatggtaccgtacgaggagcagtaagagttggtacctcacgagaagcaggagctgtataggagtcgtcagacagctcgtaggagtcagagggaggcagatcggacctctgagccagaacaacggcacgggatggtgcagttagggccgcagaagtagaaggtaccagagtatcagaaggtaccggagcagaagaaggtaccggagcagaagaaggtaccggagcagaagaaggtaccggagtagaagcaggagacggagtaggagaaggtaccagaataggagaaggcaccggtgtaggagtcgacggaggctgcgacagaggagtagtggatgcagcaggagagaccggtgccgaagcagacgacagagcggcagatgaacctggcgattgaacaacagtactgccagatggcgtcgatggaggcgagggagatggggccagagacacacgaggaccctgagtgaggcctggagcaggtgccagaatagaaggaaaactgccaccaccactacctccaccaccaatggaggtagccgatacaacagtagacgtcagaggtctagcaaaaggaaagacattttcttggaaccgaacatgagaagaggtaatcacttgtctggtagcgagatcataaacaagatgagccttccgaaacggatcagatccaagataaacacccttgattgcacgagcgaccaacttcagttgacggtgattgggtggaacattcacaaaggcagcacacccaaacactttaagttgagataagataggcctcgcgccatgccagagttcaaatggcgagcgattttggagaacaggtgttggtagccggtttaggagaaatgcagcatgttggagtgcatgcgggaagagcggtgaaggaagagaacacgcagtgatcatggtacgcgttttgtcaagaacggagcgaatggctctttcagcacgtccattttggtgtgagttaccaggcacagtgagctgggtctggataccttctgccgcaaagaaagaagtaagcgtcagattgacaaactcacctccattgtcagaacgaaagttacagacacggtagccaccacgactggagaagtggtttgtccatgccttaataactttgataatgaagtccgcagcatccgatttcttgagaataggcccaacagccttgaagcgagtaaagtcgtcaagaagaatacaaaaataaaacaacgaggagggaccaccggcatgaggaccggataagtcacagtgaagaagttgcaagggagcagatgtgactggaccggtggtcgttttgggaataacccgagtgctcttggagcgaagacatgcttcacatgaaatcgagtcgtgaacagccgtgcgaggcatgttcggatatttcaaggccagacgaacgacagtcggagaagggtggccaaggcgagcatggacaagagcagaggcagaaataggtgccacaacagggtccgcagcaggagcagcgaccgtaacaggagcgggggccgagtaggcagagtggtcagcccgcgagacagtcgaggggcggacaagttcaagacacagcaagtaaagatttctcaggtctctggtagcaagttggccatacttggggtgaacaatatcatcatgagagataacaagcttgtcgcccgtagtagtaacagccaggatggaaagaagattctgagtacagtcaggaacgtaaagaacattgaacacccgaatcttctgaccatggagatcaaacacaagagtaccacgaccggcaatcgagagaggctcgtgaccggcgttcatgacagaaccagagtgaggaatgatgtcatggaagagacttctatcgttacaaatgtgggtagaagcacctgaatcaaaaataaagctggcagaggaagaagaagccaagagggcatagtgggtgtagtgagcgagatgagcatagtaagcaccaggttggtcaaaaccaaaagtcagagcatcatcagtgagagcataatgagcagcaggctttggacgagagccgtgcttcctgcggtgctttcctggaccgccaggaccgaagcgtgaggccatacgaggaacttcaccctcacgataaggagcagggcagttcttggccatgtgaccacacccatagcagttgtagcaatcaagctgccaaatcagatccgtacctttagccttgatcaagttcctggtgacaggacccgaaggtgaagacaaggaggtaagggcataagcagattgagacgaggacaggaccagcaaggcggaggacgtggcaggaggagaaagttcatcatgataagcaaagaaattgagaacttcgtccgcagtcaccgtgggagtcaggcgaacttgagaaaagaatagatctctcaccttggagtttcccgtaccataaaggaagaggagcgctttcatggagtcgttatcgtacttcgtcataaacgcagtcaacttttcagcaatcaagaacccagcttcagtcgtaatagtcggatcagcaaggcgaccaaataagtacttgagataaccgaccgcatccctagagctggcgatcgcatacttggtttcgacagctttccaagtttcgacacccagagagtagtgcgtgaacaatgactgaacgtcaggcttcatacacttgaggataagctcacggagcttgtggcttaacgcctgctggtccgtaaaggtgatggaaagttctttctctgaaagataagcagcaatctctgtagccaagacacagctactgaacataccagtcatccagtctttccattccagaaagttctcacggcctctgaggagaagagtatcaatgaccatgaggccggaatttaattggctcataacctgttgaactgtttgctttggaagctcagtagattgaatcggattgttcataatgtaggacagtatattgattaacttatttaagatagataatttccatatagaagaagaaaaagttatagaaagttagaaaggagaaggcggagtaagacccccttatatagatgccaaatacaatcacaggctgacccctcatcaggatgaaatgaaacgacatgaccagaatttcaggttagtcggacataattgattctcattggtagatgttatctcatcacattactgtgcacaattatgtctgaatggctgcaaatcctgcattcataaagtttacgcattggattaaaaatagaatatagaatatgcttttaggtttgatatcagcatattcaacaaaataagtacttgagataaccgaccgcatccctagagctggcgatcgcatacttggtttcgacagctttccaagtttcgacacccagagagtagtgttgaaatccggtattagataaagtttgataatgcatgaatatgcatgatctagaaaatatcgtagataccggatattgataatctaatagatttggctgcaactcttgtgagagccaatcatatatcataataaggatatggtggtaatagaaaacacaatggcaggtatacagagaggataatagaaccccacacggacatacggaaatagatgtggagaaaggtttcaataccacagctatgaaacaaatgtgaaacatgagaacaagaatccatggagcatgtgaatgtgagacaacaccataaataagggtgatatcctctcagagttagatagactttcttaatgttttaataacgataactagaacaacttacaagttctacctttactgttaacaattattacacgtaagacactatgaatgcttctgaatttcaacaggttatgagccgtcacctgaagttcaactactcaatttcgtttccttcagagcaattgttggcttcaaagaacaactttccattatggaaaaccagaatggatcaacttttcgaaccaattggaaaagaatttgtggcctatcttttgcctctgacaaatgttgacactggatacacttctgaggaccgatccgcattcaactcctacattgaatttgttctttccaaaaccgtaactgaagacgttcgtgttactctcagtggtgagtcagttactggcagagcccgttggttacgtctccttactctttatggtaccatgaatcaccgcgatgttgtcaaatatgttaaggtattattgacaatgattctcaatccttctttgaaatctaaagcagtcaagccggcaattgactctctttattcctttacggaatcttataccttagatgaaattaagggtattcaacttctagctactagcagtgctcctaatctcatacaaaattacttccacctgggcagcgaatctttgacgtatgatgatgttttccaatttcttgccgaatatgaagaaaatactaccgaagcctctactgctccatcggtgcttgctgctaccttttccaccgactccagacgtccttctgttgatgccaatgatccactttggaacactaagtgttacaactgtggtggtcgtggtcacagacgtgatgtgtgttgctcgcctattcgtgttggtaagtatactggatggctgactaatacgtccaagaagcgctcctttaatgacaatgagcgcaagaagcaatacaagtcaggtgctactgccaatgttgctgttaacgaaagtgcgtttgtacttactacaaccaccggatccacgacatctcattcactggagttcatctttgactctggtgcttcgattcacatttgtcatgatcggtccttgttttggacttttcaaccggagtccggtagttttgtttcttgtgctggcggagttcgtcttcctgtcttaggtagagggtctatcaagtttaggtctgctgatgagactatagtccttcaggaagtatgctatgttccagaatgcactaagaatcttatctccgtgcatgctgctgttcgtgtctctggttcgccccttaccaccaaagtagacggaatctatcatccacggattggtcgttttggtgtatatagggacgatcttggactttccgtcctcgatatgaaacctataccacctttagtctccgtcttatctgttcttcataaccgtcttggtcatccgcatcaggctattgaacagcaagttcttcgtgacaattactcgcttgctgatattgagaaaattggtgatgtaacgaagagttgtgccagctgtctggaatataagaagacacgcagtatcccgaaggtctcccataaatcggatacaacaactcctttacaaatccttcactcggatgtctccggccctcataatacgccaggaatctcttctgaaagctatttctgtgtgcttgtggatgattatagcaagtttaagtgggtgttcccaatcgttaggaagtcggatgcggcccaccagattattatccatattcgcctattacactcatttttctctactcgtggtggatatcgtgttggtgctcttcgtacagataatgggggtgaatttgtcaaccatagtctcaggagcttccttgaacaggaaggtatagcacatcagcgtacggttgctcacaattcttatcagaatggaaccgcagagcgttcgatccgctcggtaatcgataaggccaggacgctacttggacatgcttctgttcctcaagcattctggccctacgctgttaaatgtgccgcatatttattgaataggctcccctccaggactattggtgacaagacgctgttcgaactattgcacctcgaaccaccgtcgattgatcatcttcgcacgtttgggtgtgctgcatttgcttatattcctgaacctcttcgtcccctgaaattctcacctcgggccgttaaaggcgtgatgttgggctatgatagcaaccgctcatcatacttgatatatgaattacattctcataaagtagttagctccaatcaagtttcgtttgatgaatcgatctacccatttgaaaactcacctgatcatgcgccaactacgtctgcttcgactattcctatgggcgtgtccggtgtccctcgtttttcatccgacgttgccaccacttcacgagctgaacacatctcgagtgatgaacatgaaacttcctcgagcgatcactcacgcgcacaatcacctgatatgcacagggaagattctcctgctacccctgtatctatttcgcacaatttgcaaccattacattcgtcccctgctgcgtctcttctgtcctatgattccacggactctgaacttgcacgcatgccatctaatctcctcgcatccgattctacggggggtgaggttctcaccaaacactcattgacaccagtgataagtcctgaccaaaatcagaggactggaaacaagagaaagaaagtgccatcaacgaagatgacaaagaaagtgagatatgaatacattgaagatgacaatgagttttggaacgagactttagaatcgaataacgatgatccgaacgatgatacatatgatgaagctaacatttgtatccagggtcatgcttatcaaatgtcggttgaatctacagagagcaagaaagtaccaaacacatacgaagaagccattaattcttcagattctgagaaatggattgaagccatgaataccgaaatggctgctcattctgaaaatgacacatggacattagtagatctcccggaaaagaaaacgaaggtccttggagtaagatgggtgtacaccatcaaggacggaggaaaatacaaagctaggcttgtggtaagaggattccaacaaagatatggagttgattacaaagagacgtttgctccagtaattaggagtgagagtgtcaagttgttacttgcacttgcggccatgtatggaaagaaggtacaccagatggatgtgtcgacagcatttttgaatggtaagattgatcttaagatctacatgaagcaaccatctgggtaccaggattgtagtgcctttgagaaggtgtgtcagcttaataagtccttgtacggattgaaacaggctccattgatatggaatgaaacaatgaatagtttccttgagaagatcggttttaaaaggtctttgtcagagtatggactatacacgagaagaagtgtgatcattggactttatgtcgatgatttattgattgctggagacaatcagaatgagatagaagaaatcaagggacagttgagtgcccagtttaagatgaaagatcttggaatagctaggaagttcctaggcattaatatcactcaagggagtgatggaataaaagcagacttaggggattatattgataagatcctagaagagttcggaatggagaactgtaacccagtatcaacaccaggtttgcctggattgaaacttgaaaataacgagactgcgttattggagaatcctaccttataccgatcaatagttggaaagttgctatatgctagcaacacggtaagaggagacataagttttattacaggagttctcagtagatactttaaagagccaagagaggcacatcttacagcagcgaagcatgttcttcgatatctcaagggaaccaggtctcttgggcaacgttactcaaagactggacaacttgaagtatttgtagacgcagattggggatcttcaacagacaataggaaatccatcacgggctatgcgttgaagttcggaggaggattgatttcttggaaatcgaagaagcaagctatagtcgcaacttctaccactgaagccgaatatatcgcactagcagaagccgtgaaggaagtgctttggttgagaaccctatttggtgaactacagataccactaacattacctataggaattcatgaggataatgtatcctgtataaaactaagtgaacatccaaccgttcatctgaggactaagcatatcgacataagataccatttcatccgtgaaaggataaaagaggagaccataaaattaatacctgtcaaatctgaattcaatatagccgacatattcacaaaggcgctagcaaaaccgcaacacataaaattaagagcgttagcagggatttcgtgaagagactattagattaagggaggctgttgaaatccggtattagataaagtttgataatgcatgaatatgcatgatctagaaaatatcgtagataccggatattgataatctaatagatttggctgcaactcttgtgagagccaatcatatatcataataaggatatggtggtaatagaaaacacaatggcaggtatacagagaggataatagaaccccacacggacatacggaaatagatgtggagaaaggtttcaataccacagctatgaaacaaatgtgaaacatgagaacaagaatccatggagcatgtgaatgtgagacaacaccataaataagggtgatatcctctcagagttagatagactttcttaatgttttaataacgataactagaacaacttacaagttctacctttactgttaacaattattacacgtaagacactatgaatgcttctgaatttcaacagccaagacacagctactgaacataccagtcatccagtctttccattccagaaagttctcacggcctctgagaagaagagtatcaatgaccatgaggccggaatttaattggctcataacctgttgaactgtttgctttggaagctcagtagattgaatcggattgttcataatgtaggacagtatattgattaacttatttaagatagataatttccataaagaaagaagaaaagttatacaatgtttaaaagaaggtagagtagattaaggcctccttttataggtcccatatctactcagctagccgatgagatgaggtgaaaaattttcacctgaagaataaaatgcttctcattggtggacgtttcaagtgttctcaatatatgtcaaacccatggttgaatggctgcaaatcctgcacttagtaaatttaagatatccagtatattcaacatgaatggctgcaaatcctgcacttagtaaatttaagcattggattagattagaatataccccagaccttcctataagtctgggaccatatccagtatattcaacacttcttgcgctcattgtcactaaaggagcgcttcttggacgtattggtcagccatccagtatacttaccaacacgaataggcgagcaacacacatcacgtctgtgaccacgaccaccacagttgtaacacttagtgttccaaagcggatcattggcatcaacagaaggacgtctggtgtcagtggaaaaggtagcagcaagaactgatggagcagtaggagtttcggtagaattctctgcttttgctagaaatttgaaaacatcatcatacttcaacgattcgttgcccaggtggaagtaattttgcatgagattagtgttgaatatgctgatatcaaacctaaaagcatattctatattctatttttaatccaatgcgtaaactttatgaatgcaggatttgcagccattcagacataattgtgcacagtaatgtgataagataacatctaccaatgagaatcaattatgtccgactaacctgaaattctggtcatgtcgtttcatttcatcctgatgaggggtcagcctgtgattgtatttggcatctatataagggggtcttactccgccttctcctttctaactttctataacttttcttcttctatatggaaattatctatcttaaataagttaatcaatatactgtcctacattatgaacaatccgattcaatctactgagcttccaaagcaaacagttcaacaggttatgagccaattaaattccggcctcatggtcattgatactcttcttctcagaggccgtgagaactttctggaatggaaagactggatgactggtatgttcagtagctgtgtcttggctacagagattgctgcttatctttcagagaaagaactttccatcacctttacggaccagcaggcgttgagccacaagctccgtgagcttatcctcaagtgtatgaagcctgacgttcagtcattgttcacgcactacttgttgaaattcagaagcattcatagtgtcttacgtgtaataattgttaacagtaaaggtagaacttgtaagttgttctagttatcgttattaaaacattaagaaagtctatctaactctgagaggatatcacccttatttatggtgttgtctcacattcacatgctccatggattcttgttctcatgtttcacatttgtttcatagctgtggtattgaaacctttctccacatctatttccgtatgtccgtgtggggttctattatcctctctgtatacctgccattgtgttttctattaccaccatatccttattatgatatatgattggctctcacaagagttgcagccaaatctattagattatcaatatccggtatctacgatattttctagatcatgcatattcatgcattatcaaactttatctaataccggatttcaacagcctcccttaatctaatagtctcttcacgaaatccctgctaacgctcttaattttatgtgttgcggttttgctagcgcctttgtgaatatgtcggctatattgaattcagatttgacaggtattaattttatggtctcctcttttatcctttcacggatgaaatggtatcttatgtcgatatgcttagtcctcagatgaacggttggatgttcacttagttttatacaggatacattatcctcatgaattcctataggtaatgttagtggtatctgtagttcaccaaatagggttctcaaccaaagcacttccttcacggcttctgctagtgcgatatattcggcttcagtggtagaagttgcgactatagcttgcttcttcgatttccaagaaatcaatcctcctccgaacttcactgcatagcccgtgatggatttcctattgtctgttgaagatccccaatctgcgtctacaaatacttcaagttgtccagtctttgagtaacgttgcccaagagacctggttcccttgagatatcgaagaacatgcttcgctgctgtaagatgtgcctctcttggctctttaaagtatctactgagaactcctgtaataaaacttatgtctcctcttaccgtgttgctagcatatagcaactttccaactattgatcggtataaggtaggattctccaataacgcagtctcgttattttcaagtttcaatccaggcaaacctggtgttgatactgggttacagttctccattccgaactcttctaggatcttatcaatataatcccctaagtctgcttttattccatcactcccttgagtgatattaatgcctaggaacttcctagctattccaagatctttcatcttaaactgggcactcaactgtcccttgatttcttctatctcattctgattgtctccagcaatcaataaatcatcgacataaagtccaatgatcacacttcttctcgtgtatagtccatactctgacaaagaccttttaaaaccgatcttctcaaggaaactattcattgtttcattccatatcaatggagcctgtttcaatccgtacaaggacttattaagctgacacaccttctcaaaggcactacaatcctggtacccagatggttgcttcatgtagatcttaagatcaatcttaccattcaaaaatgctgtcgacacatccatctggtgtaccttctttccatacatggccgcaagtgcaagtaacaacttgacactctcactcctaattactggagcaaacgtctctttgtaatcaactccatatctttgttggaatcctcttaccacaagcctagctttgtattttcctccgtccttgatggtgtacacccatcttactccaaggaccttcgttttcttttccgggagatctactaatgtccatgtgtcattttcagaatgagcagccatttcggtattcatggcttcaatccatttctcagaatctgaagaattaatggcttcttcgtatgtgtttggtactttcttgctctctgtagattcaaccgacatttgataagcatgaccctggatacaaatgttagcttcatcatatgtatcatcgttcggatcatcgttattcgattctaaagtctcgttccaaaactcattgtcatcttcaatgtattcatatctcactttctttgtcatcttcgttgatggcactttctttctcttgtttccagtcctctgattttggtcaggacttatcactggtgtcaatgagtgtttggtgagaacctcaccccccgtagaatcggatgcgaggagattagatggcatgcgtgcaagttcagagtccgtggaatcataggacagaagagacgcagcaggggacgaatgtaatggttgcaaattgtgcgaaatagatacaggggtagcaggagaatcttccctgtgcatatcaggtgattgtgcgcgtgagtgatcgctcgaggaagtttcatgttcatcactcgagatgtgttcagctcgtgaagtggtggcaacgtcggatgaaaaacgagggacaccggacacgcccataggaatagtcgaagcagacgtagttggcgcatgatcaggtgagttttcaaatgggtagatcgattcatcaaacgaaacttgattggagctaactactttatgagaatgtaattcatatatcaagtatgatgagcggttgctatcatagcccaacatcacgcctttaacggcccgaggtgagaatttcaggggacgaagaggttcaggaatataagcaaatgcagcacacccaaacgtgcgaagatgatcaatcgacggtggttcgaggtgcaatagttcgaacagcgtcttgtcaccaatagtcctggaggggagcctattcaataaatatgcggcacatttaacagcgtagggccagaatgcttgaggaacagaagcatgtccaagtagcgtcctggccttatcgattaccgagcggatcgaacgctctgcggttccattctgataagaattgtgagcaaccgtacgctgatgtgctataccttcctgttcaaggaagctcctgagactatggttgacaaattcacccccattatctgtacgaagagcaccaacacgatatccaccacgagtagagaaaaatgagtgtaataggcgaatatggataataatctggtgggccgcatccgacttcctaacgattgggaacacccacttaaacttgctataatcatccacaagcacacagaaatagctttcagaagagattcctggcgtattatgagggccggaaacatccgagtgaaggatttgtaaaggagttgttgtatccgatttatgggagaccttcgggatactgcgtgtcttcttatattccagacagctggcacaactcttcgttacatcaccaattttctcaatatcagcaagcgagtaattgtcacgaagaacttgctgttcaatagcctgatgcggatgaccaagacggttatgaagaacagataagacggagactaaaggtggtataggtttcatatcgaggacggaaagtccaagatcgtccctatatacaccaaaacgaccaatccgtggatgatagattccgtctactttggtggtaaggggcgaaccagagacacgaacagcagcatgcacggagataagattcttagtgcattcgggaacatagcatacttcctgaaggactatagtctcatcagcagacctaaacttgatagaccctctacctaagacaggaagacgaactccgccagcacaagaaacaaaactaccggactccggttgaaaagtccaaaacaaggaccgatcatgacaaatgtgaatcgaagcaccagagtcaaagatgaactccagtgaatgagatgtcgtggatccggtggttgtagtaagtacaaacgcactttcgttaacagcaacattggcagtagcacctgacttgtattgcttcttgcgctcattgtcattaaaggagcgcttcttggacgtattagtcagccatccagtatacttaccaacacgaataggcgagcaacacacatcacgtctgtgaccacgaccaccacagttgtaacacttagtgttccaaagtggatcattggcatcaacagaaggacgtctggagtcggtggaaaaggtagcagcaagcaccgatggagcagtagaggcttcggtagtattttcttcatattcggcaagaaattggaaaacatcatcatacgtcaaagattcgctgcccaggtggaagtaattttgtatgagattaggagcactgctagtagctagaagttgaatacccttaatttcatctaaggtataagattccgtaaaggaataaagagagtcaattgccggcttgactgctttagatttcaaagaaggattgagaatcattgtcaataataccttaacatatttgacaacatcgcggtgattcatggtaccataaagagtaaggagacgtaaccaacgggctctgccagtaactgactcaccactgagagtaacacgaacgtcttcagttacggttttggaaagaacaaattcaatgtaggagttgaatgcggatcggtcctcagaagtgtatccagtgtcaacatttgtcagaggcaaaagataggccacaaattcttttccaattggttcgaaaagttgatccattctggttttccataatggaaagttgttctttgaagccaacaattgctctgaaggaaacgaaattgagtagttgaacttcaggtgacggctcataacctgttgaaattcagaagcattcatagtgtcttacgtgtaataattgttaacagtaaaggtagaacttgtaagttgttctagttatcgttattaaaacattaagaaagtctatctaactctgagaggatatcacccttatttatggtgttgtctcacattcacatgctccatggattcttgttctcatgtttcacatttgtttcatagctgtggtattgaaacctttctccacatctatttccgtatgtccgtgtggggttctattatcctctctgtatacctgccattgtgttttctattaccaccatatccttattatgatatatgattggctctcacaagagttgcagccaaatctattagattatcaatatccggtatctacgatattttctagatcatgcatattcatgcattatcaaactttatctaataccggatttcaacattggctacagagattgctgcttatctttcagagaaagaactttccatcacctttacggaccagcaggcgttgagccacaagctccgtgagcttattctcaagtgtatgaagcctgacgttcagtcattgttcacgcactactctctgggtgtcgaaacttggaaggctgtcgaaaccaagtatgcgatcgccagctctagggatgcggtcagttatctcaagtacttatttggtcgccttgctgatccgaccattacgactgaagctgggttcttgattgctaagaagttgagatcgtttatgactaagtacgacaatgactccatggacgcgctcctcttcctttatggcacggggaactccaaggtgagagatctattcttttctcaagttcgcctgactcccactgtgactgcggacgaagttctcaatttctttgcttatcatgatgagcttactccacctgccacgtcctccgccttgcttgtcctgtcctcatctcaatctgcttatgcccttacctcattgtcttcacctttgggtcctgtcaccaggaacttgatcaaggctaaaggtacggatctgatttggcagcttgattgctacaactgctatgggtgtggtcacatggccaagaactgccctgctccttatcgtgagggtgaagttcctcgtatggcttctcgtttcggtcctggcggtccaggaaagcaccgcaggaagcacggctctcgtccaaagcctgttgctcattatgctctcgctgatgatgctctgacttttggttttgaccagcccggtgcttattatgctcatctcgctcactacacccactatgctctcttggcttcttcttcctctgccagctttatttttgattcaggtgcttctacccacatttgtaacgatagaagtctcttccatgacatcgttcctcactctggttctgtcatgaacgccggtcacgagcctctctcgattgccggtcgtggtactcttgtgtttgatctccatggtcagaagattcgggtgttcaatgttctttacgttcctgactgtactcagaatcttctttccatcctggctgtaactactactggtgacaaactagttatctctcatgatgacattgttcgccttaagtatggccaacttgctaccagagacctgagaaatctttacttgctgtgtctcaaaattgtccgcccctcgactgtctcgcgggctaaccactctgcctactcggcccccgctcctgttacggtcgctgctcctgctgcggacgctggtgtggcaccaatttctgcctctgctcttgtccatgctcgccttggccacccttctccgactgtcgttcgtctggccttgaaatatccgaacatgcctcgcacggctgttcacgactcgatttcatgtgaagcatgtcttagctccaagagcactcgggttattcccaaaacgaccaccggcccagtcacatctgctcccttgcaacttcttcactgtgatttgtccggtcctcatgccggtggtccctcctcgttgttttatttttgtattcttcttgacgactttactcgcttcaaggctgttggccctcttctcaagaaatcggatgctgcggacttcattatcaaagttattaaggcatggacaaaacacttctccagtcgtggtggctaccgtgtctgtaactttcgttctgacaatggaggtgagtttgtcaatctgacgcttacttcattctttgcggcagaaggtatccagacccagctcactgtgcctggtaactcacatcaaaatggacgtgctgaaagagcgattcgctccgttcttgataaaacgcgtaccatgatcactgcgagctctcttccttcgcacctcttcccgcatgcactccaacatgctgcatttctcctaaacaggctaccaacacctgttctccaaaatcgctcgccatttgaactctggcatggcgcgaggcctatcttatctcaacttaaagtgtttgggtgtgctgcctttgtgaatgttccacccaatcaccgtcaactgaagttggtcgctcgtgcaatcaagggtgtttatcttggatctgatccgtttcggaaagctcatcttgtttatgatctcgctaccagacaagtgattacctcttctcatgttcggttccaggaaaatgtctttccttttgctagacctctgacgtctactgctgtgtcggctacctccattggtggtggaggtagtggtggtggaagtttcccttctattctggcacctgctccaggcctcactcagggtcctcgtgtgtctctgcccccatctccttcgcctccatccacgccatctggcagtactgttgctcaatcgccaggttcatctgcagctctgtcgtctgtttcggcaccggtctctcctgctgcatctactactcctctgtcgcagcctccgtcgactcctacgccggtgccttctcctattctggtaccttctcctactccggtaccttcttctgctccggtaccttaatgaaatctacgaagttaagaaacttctcctgaacaagttcaagatgaaggatcttggattggcacgcaaattcctaggaatcaacatagaacagggccctgatgggatcacagcaaatctttctgactccatcaagaaaacgttggaggaattaaatcttgaagagctcaacagcgtgaaaagtcctattattcagggacagcatctaaaccagaaatccaaaccctgcgatgcaacaatttacagaagcatagtaggaaagcttctttacgctagcaataccattcgaggtgatattgcgtatattgttggaatgttaagtcggtacctcaacgaaccaacagaggtaactctaactgccgccaaacatgttctccgctatctaaagggaacacagaaacttggtcagcactacacaaacataaacgatctacaagtgtttgttgactcagactggggaagtgatagcagtgacaggaaatcaatcagtgggtatgccatcaagtatgggggaagcctaatctcttggaaatccaagaaacaaaccaccacagcattgtcgaccactgaagctgagtacatggccctcgccacagttatcaaagaagttatctggctaataacattcttcagagaacttcacatcccaatatcactaccaataatgatttgggaagataacacctcgtgtatcaaactcagcgaacatcctgtacaccacgaacgtacgaaacacatagatattgctatcgcttcatccgtggcaaaatcatagacaatattgtcaaacttcgccaaatcaaatctgccgacaacgttgaagacatgtttacaaaaggactaccacgggtagccttccaacaagttaatcgaactatcaagaatggaactaacataataaaatgaccattggattaaggggggatgttgaatatgctgatatcaaacctaaaggcatattctatactatttttaatccaatgcgttaactttacaagtgcaggatttgcagccatttagacataattgtgccacacataaagatgttgatatcatctaccaataagaaacgattatgtttaattaatctgaaattgctaatcttgcctcatttcatcctaatgtggcgtcggcctatggtaggattggaatctatttaagggggtcttactcccccttctcctttctaactttctataactttttttcttgtatatggaaattatctatcttaaataagttagcaatttactatcctacataatgaacaatctgattcaatctacggagctttcaaagcaatcagttcaacaaatttgatataagtataaacttattcaaaactttgagtattccacctttctcatatatctcagagttgcttacacatcagtgccgcttaagttgcgtcttgtgcgttgctgaaaaatatttcctcatctaaaacattatttctttcattcgcagtttcttgttaaataactaaatttcaatctattggaatactctagattcccaaaagtggctcaagcagattagatggtattttattgactccttttctgtatattgtatagtcacgggaggaattaattgaacggattcatccaacaaatctatccttttgaagcttgtctctcctgattttccttcaatgagtcccacaattgttcaatggattgatttctggtgaatatagggctagatatagtacgctacatcgacgagctgaagcagttcttcgactctttcatttttatgaatgggtgagcatcgtccattgctagataagaattctctagctatttctacagtaaggaagatcttgaaatggctagcaactgttccgtttaacagtgtctgggggtaactataatgcaacctatgcctcattcttgctgattgtttcgatgttggactgaaacttaaatagacaacatcataagaacatacatcttcccattgaacgacctttggaaccagctgttggggctacaactgctgggtgttgaaatggtctccaattgaagtgggacttcctaatgactgatcatttttctttttcttgacgctgcaactgtttagacaaggcctgcaatttgccaagatggatatacagttaattcttgataatgacttcgatttctaatcattcttctgattttggagaatatcctagcatattacgttgttatcaccccttatctcgctctttattcatatccttatctccccctagtcttatcttcagatatctaatttcattaggtataagtaatattccgtaaaaaggggggtctgaatcaccagtgatagaactgtatttgagaatttccaatgatactgcatataacccgattgctggtacggagtttttaatttaattaaactatatactaattacacttatatataataatagtatatgttatatacatatttatactaagataagggtatatattttatatattatttaaagtataaatatacccgcagcatttaacataagtaacatacaaaatgaagaatgtaccttgaacgaggcatattggcgttctagaaagttatttattttgtttcaaagttagaatagtttcgcaattgaagactaataaagttccaaataagataataaaagttcgctgaaacacgggaataggcatgttgaagtcaaaaaatgagattgcggaaaaatatgttcactaatgaagaagatgacataactaaaaactaaagcaatagctacagctattggaatgaggtttcgacgatgcatatttgaacttagcagatggtaataggcaagaattacaattaaatgtcaatagtaaagtatgcgccaattctttggtttgtagttatctgatagagaaacatatcaaaaacaaaatgaatttgaacgacaaattccacttattgaagtgattctaaagtggattttcttgagggcgtattcaaagcattgaactgagtggtcaatacaatcacggatatgctcagtaggaattgtgttagcagtttcacgaattcattttgataccgtatcttttagcacttttgccatttcttgccgtcttaatttctactcttaagcatcttctctccaaaggtaagcgcattctttggcaatagtaaagtgttttttagaagttagaaaacgtgaagtctaggccataatttgtatgacttcagcgccaacgcaaaatccgcaatgggcgaaatcttgtttagtgggcaggggcgagctttggttggaaaatactgtacctcaaagtcgcctgaacaacagtgtggcacatttagtgtccttttttgtatggttcacttatgttcatactcaatcttattctttgtaaaaaagtggacaacagaccagaggcaagttaccagcttaaattggctatgctagaacggaagattcctttccaaaaagtccagcttcaatcttttttaaaagcttaatctaaatattaagattactccctcgattattaagttgatgttcaactttagaaatccaaattaccgctgattgaaatatctcatttcttatatgttgctctccgtctgcattacctggttcagcatgtgtataggacagtaaaattccaaagcaattgaccaacttttgtagtaatttcttatttgcacataggacagactcttcctcttccatggtaagttcttcaggaccatgcgttggctgtttcgttctaccattcgatattgaattgaatgtatcaccctggtaaattatccttcggtggagtagcaacggtaataaaataatatctcgaaatgcaaggagtattatgttttcaatttcaattggatgttgaatacttgttagacgctgaattgagatctcatggaagattttctgaagtggaagaaatatgctaagcaagtagaagcggatcttacaattgaaataatcccacatcatagatatctttgaccaagaaagtattacattgacgacgggcttggacttgttctgaagtgttgaactcaatatattgtcatatgttttagtttcaaagttgttaaagtctctctgaaatacaatcatcgattttgtaaaaaatgtgaaaaggtcttgggaaatctctcttatcttgaagtcatccaagctgtctcctatttcttctcgtattgaaatagaacttgaagaagcaacgctgattaatctattggatttcgattttactttttgtgttctattcacaggactccctgttgaagaatcgtagggcaatccactgctaatgtcgcttaaataattctctttaatgaaatttgcaacatcctcgaccgtataccccgtgtgtggatgaaggaccccattcagtaatcttttttgctgagatgccaaaaagagcggcttggtaatatatagtaggttactaaagaacctgctattcttctttccaaagtccatttggtaattactcaagtactcattgtcacaatcatgttcactcataattcccaaacctacttcagcattttgctgtttgtgcgtcttgcttggaacaaattgatcagatatcatcaactttttatgaatatcaagaaacgaagaatggtcgttgagtccgtccatttcatcaacagagtaattgggatctgtgaaattataaatcattgcaaagttcacatcggtaatgtaggagtttgaattatttgaagacaaactcactgtagtccttgtaggattgttcattttcagttggtttggtgattcttcttttgatgcaagtatcgaattttctcctgaaacttgtgaattgctgtgggacctgtggaatagactgtggaatgtggacactggcgaactcatggagttctttctatttgaatagttacttggatcatctatcagagttgaacttaaaatcttcttggaaactcttaatccatgatggccattcgtttggatactcaagtcgggcttattcgatgtagttttgccggcaaacttcaattttgacttgggtagcctgaatttagcaccgttggttttctttgattccgaaaccaaggtagaaacgtcgtcatcactattattaaatacgctctcttcttctccttgcccatgaggttgttgaaaaacatttgaaacagatcggtttcttgtaaatagtctagttaatgggtttgtcttagatgttgctgaacttgcagttgaaatcagggaggtattagtgtttagcttttttaggttcgtgaatcctacactagaaatttgtgagctcatgattgacgattgattgatttgaacattagatgaatttgagttattggcatgtatgtagaatggtgaactttgtccgtgagagctagtttccataattgccttgtgtcagttgtgtttggttcaataatgtgtcagttgtgtttggttcaatatggatgtctcttcgaaattatcctttatcttgcttgcatacaatttttcctagaatgtaaaaatgcgctgtacagtaaaaaacctcctttaaaatgaatttgacttgttagaatttgcttgaaccacatagtaaatctcattgagctcgctctgaaattgatttcatatttgagaataacatgatccctttctagcttacttctccttcactgatttcattgctcctgttatcaaaagtatgctccaggtgcaaactgcatgagccataacgtaaaattatgatccattggaaaatgtgaaccattatttgagttaggtcttaaagacccttgagtttagtgagttccgaaaacatggatgcacgtcatacaataagtttatgtatatacaatctagaatttgctcctcctggataatcggtttttaagtaggttcatcaaattcaaaactggaaaatctcaggttgaagtgcacaacaaattagaagtgatgggagaggaatctacgatactactttcttacacaacatacaaatcaaagaggacgttgtaattcttatccttagtccaataaagcactatacatggtcaacgaagactatcggcttatcccaatttaataaggcaacgcttcttgtatcatgaatggacaaaattatctgtgtgctggaaatatgaggcgaaaggaaaagattttggcaagattaataaggaatatgatacagctcgatggataacattttcatgcttcccaaagttttatgactttctaattgttatcgttgcaattaccgatgtgagcgcttcacttgggaacatgtactaatagcattgagactggtccacaaatcagcaaacaagaagctcaccaatgttcgacagtacccacacacttagctactaaaaataatggagagggtatacttagtattcatatgtcaatctctctccctctcccaatttatatcagtgacggcaaactcgatgcctgtgtgataacaagataatttttttatcaaaatgtggaacttgcaatatcagatcatgagtaagctggtgcaccgggatgcctttgtttatgatgagatgaaggagttcttcgaattttatggagtgccactacagcgtgtagaagtttttagctatagcatgaattacatggtctacacgcatactgcagtgcggccctgcaacaatcattcaaaaatagtctaataagtaaataatttaatgaagcttggtatgacaattgaaccatatttcagctcgtggtaaactcttcgtattagaaattggggctggctattattaagtgagctcaatttggtaaaaatgttacaaattatgacgctttcttatgtaataaaaggtattcaattaatcagttgttcgtgcacatatcaaaagtgttgcattattcatttcctatttgagaggtttcgaaaacaaatagctctttacagagattgaaagcacagaaaacatatgaaataatataaaacctagtctccgcaagattctttttccaaattctttgaaatcatcaccaataaaatgaatcctttcgaagatgaggataacccgtttagggagaatcagcctgccttacccaatgctgcctttacaagtgacagaacttctcccaaaagataccaccaattacaagacgaagaggatgcggacgacgatttcatggcttttccactgtctacacatcagagacaatctccaaatatctttaccagaagtactgctagagtaaattctaaattaaaaggaaataacttaggcgatactccaaacttgctgttcgctaacaattctacccctagagctcaatttactacaagggaatctccaaagaggcagaaaaagagggaagtgctaattgttgatcatgaagatgatgaaaattatggatcccctacgaggtcacagttcggcgggagctctattgccagtgaaaggtttttagaaccaccgcaaccgattttctcaagagaaacattcgctgaagccaacaacgcagaagacgaaaactcaacaataacagatgaaaaggataattatgattataattcctatcagaaagcacatgaactcgaagagaggtcattgtattcagagtctactgcttatagtgggtcgtcatatttatcacaaccaacacacgcagagagtgactattttggagcatcaattgatggcaatatcatgagtaatatcaacaatggctatgttcctaaaagagagaagacattaaccaagagaaaagttagattggtcggtggtaagacaggcaatctagtgttggaaaatccagttcctgaagaacttcgaaaggtgctaacacgaactgaatcgccgtttggagaattcacaaacatgacttatacggcttgtacgtctgatcctgataatttcatcagcgacggattcagtctcagggctgccaaattcgaaagagaaaccgagattgtcatctgtatcactatgtacaacgaagatgagcatgcatttgccagaaccatgcatggggttatgaaaaatgttgcccatttatgttcgaggcataagtccaaactatggggcaaggaagcatggaagaaaattcaagtcattattgtagcagacggaagaaacaaagttaacgaatctgttctccaattattgacagccacaggatgttatcaagacaatttggctagaccatttgtaaacaacaagaaggtaaatgcacatttatttgaatataccacacaaatatcaatcgatgaaaacttgaaattcaagggagatgaaaagaacttggcaccagttcaagtattattctgccttaaagaacagaatcagaagaaaattaattctcatagatggttgttcaatgccttctgtccaattttggatccaaacgttgtggttttgcttgatgtgggaactaaaccagataaccacgctatctataatctatggaaagcttttgatagggattccaacgttgctggcgctgctggtgaaatcaaagcaatgaaaggaaaggggtggatcaacttgacgaatccattagtagcttctcaaaattttgagtacaaaatgtccaacatattggataaacctcttgaatcattgtttggttacatctctgtgttacctggggcattgtctgcatacagatataaagcattgacaaaccatgaagacggtaccggtcctttggcagcatatttcaagggagaagaccttttaaatgaccatcattcggacaagcagaacagtaaaacaaatttctttgaggcaaatatgtatcttgcagaagacagaattttatgttgggagttagtcgcaaaaagaaaggagaattgggttttaaaatttgtcaagctggctactggtgaaacagatgttcccgaaaatctacctgaatttatatcacaaagaaggcgttggatcaatggtgctttctttgcagcgctttatgcattacgacacagcaatagaatttgggcgaccgatcattccttcgctcgaaaattttggttccagattgaattcgcttatcaattcgttacacttgtcttttcattcttttcattgagtaacttctatttgacgttttacttcttgactggttcattagtgtcaaacaagaactttggtcataatggtggattctggatttttacactcttcaactatttgtgtatttgtattttgacttcgttgtttattgtatcgataggaaacagaccacaagcttccaagaatattttcaaaactttgattatccttttgaccatttgtgccttatacgcattgatagtcgggttttattttgttttcaacacgatcacagaatttggaatgggagattcgtccacctatgtccttgtgagcattgttgtttctttgttagcaacgtatggcctatatttcttgatgtctttcctatacatggatccttggcacatgtttacatgttctatccaatacttcttgatgataccttcatacacctgcacattgcagatatttgctttctgtaacacccatgatgtttcctggggtacaaaaggtgacaataaccccaagattgacaagagtaaccaatacattattgagaaaaatgacaaaggagaatttgaagctgtcgtagttgatgtgaatatagacgaagtttacttggagactttgtacaacatcagagctaaaagatcaaatagaaaggttgctcatgtacataaggaaaaggctcctatggaaggagaagactatgcaaaggatgttcgtaccagggttgttttaatttggatgatagcaaacctagtattcatcatgacaatgcttcaagtttattctcctggcgagactacaaagaatatttaccttgccttcatcttatggactgtcgctctattgtcacttttcagagcaattggctccttgggataccttttacaaaaccttgcaagatttgtcgttgagagcagaagcaaatggttacacaggagagaaggttatgctgtaccctctcataatcctttgaattgagtaccctccagtagattttattgcaattatacccaaaatatacattctaaaccacacctctaggagagctaaatgtgcagcgactgtagcaagtgttttactttaccggatatcatgttggcaacaattggagatttgatatgttcaaatgacaagtttctctatgttgaagatatgggtctgcatatagatattttcttagttaggtacactatatattggatttatatacacttaactcccgactatcatataacacttcttcttgtacgaagtttttccttacatttttacctgttgaacgacctttcaaaggaataaagtatgtcttccttccacaatttcctcctgttcatcctcggtctctcttcctccttgaactcccatgcttcaatttaagtcgtgtataaaccattttctcggatcaatatcttggttttctttttgatctttctgaccttcagatgggacagttctaacatacaattccgtggctataaagacacgattgcaatggttgctttggagagaaagagaaagagcagtagttctactacttccaatggtacgaagaagttgaaatcccacgtatcttcttcatttattctccactcttattcgaagttgcctgatgtgaatgcctttccaaagggcagatctgagcctttagatatttttgtctggggtactggttcaatgtgtgaattaggattaggcccatcggctaagaataaggaggttaagagacctaggttaaaccctttcttaacagaggagaaattggatggaacaaagattgttgatttttccgtaggtggaatgcacactcttgctttggatggaaagaatcgcatttggtcatggggtggtaatgacagtggcgttttaggtagagatacttccaaggttaaggaggtcttgaaagatgtggattccaatgaatcagaagatgatgaagatggagacttgaatgaggcggaatcaacaccgggcttagtcgaaggcttacctcaaatcaaaagctcaaaaattgtacaattggtagctactgataatttgagcgctgcattgtatgacaatggagatgtttacgcttggggttgcttccgttgcaatgagggcttgctcggtttcttgagagaagagataaaagtgcagaagtctcctttggaaattaaggagttgaagaacattgtgcaattggcccgcggtaaggatcatatattggctcttgatgttaagggtattgtttatgcatggggtaacggccaacagtatcagttgggacgtcgtataatcgaaagacaccgttatcgttctttagaacctcagcaatttggattgtacaatatcaaatatatcgcaagtggagatttccactgttttgcaattgatcatgacgacaaggtttacacatggggattgaatcaatttgggcaatgcgctttgacaaattcagatggagaattagaagatggatccttgattactaagccaacattggttcctagcttgtctggtaaagggattgtcgaaatatctgcaggtgaacaccatacattagcccttacaagggaaggtgatgtcttgtcatggggccgttatgacatgaaggaagttggtatttctaaggacagattgcctaagtcaacttttaaagatgcacatggaaatgcaaggtctgtacccactcctaccaaacttcattttggtaaggtggaagataatggtgtcaagattaaggaaatcggaacaggttctcataactccttcgctgtaacggatgatgggtttgtttattcgtggggttttgctgatacgtatgctccagggttaggcccattggacgaagacgttgagattcccaccagaatttttaacacagcaaccaagtttactgatattaaattaatcggagccgggggacagtttgtagtcagtggtggtgttaaaattgaagatgaagatgaacgcgaagatagaattgaaaagtacgaagaaattgacggctagaaacgttatcattttttttttgcgacaaaaagtcttgttcaaggctgaaaataattccgacaaatgaattgatattgtaaaattccagcattctctatttaataaaagttttgattttatataagtaaaatagaatacttccattgcactgaaggtatatgtaaactttttaaaaaatgagctattttaaataaatactcgacagctctttagaaaagaaatacgtgaaaatggtgtatatttgaaaagactcgtacttcttacttctcttgtcgcaatcaagatgatattttccatgagttttgtagttcaattttgtaattggcatcatccgtactcttcagaaatcacaactcctgcatacaaccacaacagaatttacattgaaactgaagatactacgattctttttgtcgattactgctcatttgcttcttttaaaacaaacgaaatgtacggatctggaataaacaatcaagcgcaaaaccatggtcaaattcatgtacaacgacctcaaccactccaacagcctccgcacgatgagtcggtagctacaggcaacaaagctctaggcgatcctcaaatatatcagtggatttcagaattggtttcgggttcgaatagagagagggcattattagaattaggcaaaaagagagagcagtatgatgacttggccctagtattgtggaactcgtttggtgttatgtcagttttgttggaggaaataatttcagtgtatccatatttgaatcctccggttctaacggcatccatttcgaatagagtttgcaatgctttggcacttcttcagtgtgttgcctctaacgtacaaacaaggggacttttcttaagtgctaatttgccgttatatttgtatccttttttgtcgactaatgctagacaaagatcatttgaatacttgagattgacaagcttgggtgtaattggagcattagtgaaaaatgatactccagaggtcatcaatttcttgcttactacggaaatcgttcccctctgtttaaatatcatggaaatatcgtccgaattgtcaaaaacggtagccatattcattttacagaagatcttactcgacgaccaaggcttgacttatatttgtaccacgtatgaaagatttcatactgtcgcttcagtgctatccaagatgattgaccagctcggagcaattacaaacaaccaagctcctcagcaaacatcaaacagttcgggaagattattgaagcatgttattaggtgctatatgaggttatctgacaatttggaagctagaaaagctttggctacaattttgccagaacctcttagagacggaacgttttcatttatacttcaagatgatgttgctacgaaaagatgcttagcccaactcttatcaaacattaatgaacaacagtaggttgtcttgttgcattgtatttgggtacaattagtactgtatataatttagaagaactatggctctcaactaaattgaagcgcaatgagcactccggaaacggaagcgctgcggatattttctgcgaagataacaattttaatataaagcctttgaatttctctttcgacaaaatagttgaagttgatagcaagcagaagatgtcgtcgtataccaacgataacaagtcacatcaatttacacactcgaatactcagagaagggcatctattgtgtatggttctgttggtaagggtggtttatacgttccttcagatttcattctggctagactagaagacaatgaaacttttgaaattcacgaggctgatgaccttttaccatcaaacattgctgatgaaatacaacccttgctaataccaggaaacaagaatagatttcgtcgtaaatcacaaattgctgaggaattggtagaggaggagagagagcttttgaaagacaacaatattgttgtcaacggtgatgaagaagaggttatcgatgcttttgaggatgcaatagtgaataagaagatcgaagccacaacgtctttaatcgaattgaaagctttagttaaatcatctattcctctagttctcacatttcttctccaaaactctttatccactgtttcagtctttagtgttgggcacttgggtgcgactgagttggcagctgtttcgatgggttctatgactgcaaatatcacaggctacgccacgattcaaggaattgcaacagcattagacacgttgtgcccacaagcttttggtgcaaagagatattccttagtgggatcatatttgcagaagtgtgttgcattgattttagttgtcatgcttccggttttggttgcgtggattttctttggtcatagattaatttgtttaatcgttcctgataaagatactgcaaaacttgcagcagtatatttaaaatacattgctccaggaattcctgcttacattgcttttgaatgtggaaagagattcttgcaagcccaaggaatatatcatatttccacgtatgtcttattagttgcagctccatcaaacttattcatgaacattcttttggttcaacggtttggataccttggagctcctattgctgtttctatcaactattggttgatggcaattggcttaatcggtagcacaattttcttggttaagcccgaaagcactccaactggattgcatccgttgatatgttggggaggcttaaatgtttctgaagctttttcccattggggcaaattggcccagttggcaattccagggttggtcatgttggaagctgaatttcttgcatttgaaatcttgacattgctcgcatcatacttgggaacagtacctcttgctgcacagtctatcggtaccactatggcttcattaacgtaccaagtcccatttgcaattggaattgctgcatccactcgtattgccaactttttaggggcaggattgggacctgctgcccaaaagagtacacaagttgctttaagctttggacttataatctcattcttgaatttcttggctctctattgttttcagagaccaattgccaaagccttcactgatgatgaagatgttattaaaatggttggacaaataatgtggttgatcgcgttgatgcaaatttctgacgcagttaacgcaaattcagcaggctgcctcaggggccagggccaaacaaagattggaggtatcgtaaatttgctatcatactatgtagtgggattgccattatctatatatttaacattctattcgccttggaagggacacctagatggattatggattggaagttgcgttgcattgacaattattgggggagtacaaagttactattccttatttgctgattttgacaaattatgtgaagatgcaagaaagagaacatctgtcgaggtacatgtttgaactattagacaaaaatcatttttttaaagtaaaatatccaatataatatacaaacaattattgaaaacctagaaggcatcttgcattattgcaatcttgggtgcttccgacgtcaatcttggctttcctgctaggagttctctacgaatttcgggtccaatggcgtgatgaaatctttgcctaacagtttctaacaaaaagtctctctggtcatcggttatatcattcttgtagcgttgtgcaaatgccaagaatgccttgtgccacactactggcaactgaggttccctattttcggatatttcaatttccatagaatcttgttggacagcatttctaaatctcatgaagtaaaataccaattcgtctaaagtttggtatggtaaagcatatttcttctccactaatactctgataaagacagtggttgatggtttaaagtctctttgtaataattgagtcaatgccacagaggaatgcaaaacgggaactgatacttttgacaacacagaagcagcaatagtagcttccctaacagaacaataagagtcaacgagaggaagtaaaaaccccttgaaaaatgctgcaggtttatataacgacttcttcaaggcacggtaaatatgatagtttaatgaatggtcttctgagtcttcaatagatgttctgaatctctctaataagacactctccacaaacttttgagcttctggggcttgtaagttggatacaaataatttggtagcttcatatacagcatgcggagtccattgctctggatttgttacgaataagacatcttcccaattacgcaaagtaggtaaaaccttgaataatttaggtaactttccatgagtataagtggacaagatcttaccaatcttttcatatgcagcaatcaccttaggaggtagcaaaaccgcatccgtaggtcttgatgccttttctttcatcatttccttttcttgaattttggccataattttatcagccaaattaaaggattcaccgccatgttcggatggtccgttactttggaaatacttattgaataactcggcatctttttcatctacttcaatttcttgctcttcgtatagttcttcctcttcaaattcgaactcatcctcttcatctacgtcttcctcgctttcttcaccactctcttgtgctctaaatgaatctgcaaatgatggcttgcctaggaaaacattctcttcctcttgtatttcttcttgttgttctttcgctaactgtagaatctttctagaagtgcttgcatcaaggtactcctcttcttcttcattttttctacttcccgcctgcgaagacctaggtgttgacctcaaattaccaccttgagtggaaatatccttatacaagggattatggcgttgctttcctttggtctcagttactgtgattttacccatttgtcccctacctatctatctgtcaaagccgtgaagaattcactaatctcaaataaaatttgaatcgaaaaaaattatgtgtgtgcagctctgctctgctaaaatattttcgagcgacattctgaagacgtaaagtgtattttgcgacatagataacactaagaacaatcatagttcttttatggcctatgaagcatcaatatgccaatcaaatttatgttacaagtaaacgcctaaaatgatttcgatagccagattcattatagtgaacaataattctatatattatccgtatccgtaattaaaaatgttaaccgtactgaatcttaacaaataacgaagagtaaactaactcttccccaaatagatcattaacattaagatatctatagcccctcttcaaattattaagtctagcaacgcaaattccaattggacttgcttcgatttcttcagttttagattctgaagcaaatatagtaaatttaacaaacactagattgtttgctgcagtcatttttccactgaatgtttggttccacctagggttaaatccattctcagatacgatcttggttttgcctagagccattgaattatcatcccactcaattgtggttgccccgattatttcaaattgcacaaacggattgatggcattttcttcacctttcgattttggtaattgatgagcgctaatgatttcaaaatcaaacttcacctcaaaagttccaggggaatacttcagaacttgctttctcaaggatttaagcaaaggctttcttagcgaagtgtccttaagaacatagccttttcttccgacactgtcaaacatagcctcgcttatttgctgccctaaatcataggtttgccaattcgttgcaaccatttggaccccatgctcccaatacttaaggggcaaaaaattggatgaacggactcgaatcttagatggataaactcgcatgagataccttctattgtgcttatcaattgacgcttttttagtttcgtccttcaacatcgaatttattgatttctcgctcaacgagaaacagtgattgtatgttttggattctggtagggaaaagtttcgaaatttgagaccctgaaaatatactccaagatcacttaattcgtctataatttttgttgatttggttttgcttcggacactaaagctggatgatctgccagttccattatcctcactaaaagaagtcgtcgtggttgtcgaggtcgaagttccagtcgtataactaccatccatcggaatcaagttgtgaaatgggcttgttttcttcactttaaggagtatcctgtgcttcaattcattaggacttggtaatgtggcgttgtctaaaattggagtagcaattaatgtatctcctaatgtgttcttcaaaatatccacaatctttctctgagatgctacagaacaattgatttctaagctaataacaagggggtatggagacgtgaaaaatgcatactttttaatggtactgataacattcgagaaagaaatcgcagttgtgaatgtcctaccatgattgacaattggctctttatcatgttgaaactgtactccttcctcactttctgctacctccccgtcccacacatcaacctcgacacacctacatccacgctgtagggccctaatatatccctcaacggaagaatcccctgcaacctgtcttcccaccaaatacgtattatgggacgatgagatgtaatactcgctcaatggataactcatatactgttcttcatcctctatttgttgtatagcagtagaatatttagataggagaaagttattgaagttttcaggaagccagtagtccaaggtatccacacagaattttttaaaaatcttgtgtagcactgcattttcaatactatccttctgaacttggatgatgaattgcttgaatatttccaaagtcatagattgaccagatccacaaaccaaactccagatttccatgatatcgcttctcttcttcaaagtcgacacgaacaatttgaattgatcaaaatttagaccatttccacaaacttcgtcttctttatcgttgacttttttgacttcatcaaaaatagaccgaagataacccctgtttatattaatattcaaacgcttggaatatttgagaatgtcttcaaaagacaagaattctctaacactcttatcactctcctcgatcatccctttaacaatcttatccttttcgctcttgtcactttccttgaaatcgacaaaaagttctcgtgctaagtcatgccgcaaacttctcaagttctttattgaattgcttatccttttgaagtcatgttctgtatccgccaataagtgcaaggatttcatctttccttttttctcattgaagtaaacaatagtaatccattgatcttcaaattccttcgaaatgtgcaattcttctctataatttgagccatccttttgaaaagctatagtcttgatattgtccaaggaaaactcatacatcttcgcctttgtgctatgcatcgcattgggtaccaccaatctctgcaatgtacttgaagccgacatggaaacagaggaaaatgcatttttccaggtgaacttgaagttgatcgggtctatcttgaacaatatcctcttctttgagttctgggaaactttgagtaaaggtagaccctccttgagaaaaatatcagggatcttgatatgacctatacttttcgctaaaagcggattcaattccacatcagctaatatttcgtcattagaagcatctcccgttgaacttgggctctttgatccagaagatcgtctgccgaagataccatttgatcgcacagattttgttgattcattcaagtcgtcgtcggatttgctaaaatgcaacaacttcttgatagacattctagacgacgaatctgacatcagagtatccttggcctcattagttcttaagttagtgaataacgaggttaaatctgacagaataggagaagagttgcttcgccgaattatagcagggacatactcatcggtaacagtcaattctgtggggctgacacatatgtttatgttattgttgtcgttgttgccaacacaagaggttgatctctcatctcgagtattcatcatacaatcgcattcctatcctccgtttgaataaattagaataacaaccaggatatcacttccattacaatttctaatgcggataatcaaaatttactccatcgatttcgcgcataacggtttcgataatgactgcactatatacaaaatttatatgatttataattctacttcttcatctaatcgaacgtccatcttgccattggtctgaagatactttttaacgtcattgacttcgtattcacctctgtgaaacattcctgctcccaatgcagcgtcaattccacattccaattcgaaagcgtcttggaaatgttgcggattaccagcaccagaacttgcaattactgggatggaaacgttgctcttgatttgagtcaataattcgagattgtatcccttgttggacccatcatgatcgatcgagttcaataatatttcacctgcacccaattcctcgcaagcggtacataattcaagagcgcccaactcgtggacctttctccctccttgtgaagtaacttggtagtagcagtactgttcgccattaggtccaaacttggctgggtctacaatttttatggtttgcatcttggtttccatcggactagcagcatactttctctttggatcaacggatataaccacagcttgcgcaccaaaagttgcagaaatgctttcgatagatgttttgccagttttttgctttccatttgcataatactcttctgcaatagtaacagcatcacttccaatactaactttgtctgctccagatctgaaatacaaatcagcaaccttaaccgcaggcactaatttgccggtttctgggtctgtcatatccttaataccaccaccaactgttaaagggacaaaaatggtttcagcggctttgctcaaaacttgaagcatgggcaagtcttttaacggagagttacggaaagaggtaatgtttagaaaggtaacttcgtcagcaccttgattgtaatatctggtcgctaattcaactggttttccaagatttctaactttgctttcactcagggcagtttcgcggacgttgtattgatcaccttttgtgacaaccaaatcgccctcatcgttagatctgacgtctaaacatgctatgattcttctggtggttccacctaaggattgctcgactccaacaacttcttgaatgatagatttatcaacatcggcaaactgaatactttctaagaaagattttataacccttaagccagccaaaccagacttttccgggtgaaattgagttgcaaagaaattcttgtagttaattgctgctaggaatttttctgaaccatatcttgcaattgcaaagttccagccctctttagaagccttttccaaaatatgtttgttctcatcatttataatagctgcgtaggaatgaacaaaataatatttgttaaatgtgttgatatggtataacgatttagacctctctaaagagttgcaaccaatcttgatatcggttatactgttccaaccgatatgtggaacagacttctttaattttttctcttcgaatattggatcatgaatgttaaacttggctaatctcaattttaaaaaacccaatccacgaaaatccactcctgggctttcttctgagctgtcaaagaatgcttgcaacccaacacaaatacccatcaatgatcttccactatcaatgtacttgttgattggtttaattaagtttctcgcatgcatttccctcacgaagtgtccatagtttccgacccctggaaagatgagcttttcaatgtcattgtcatactgttcgaaatcatccgcattacgaatgaatttgacgtcgtattccccaatacgctttatggcattggccaatgactgcaagtttccactctctacgtcaattacataaactgactttaccatttttttaatgtagttattcgaagtttctgttggactatttgagacgggaaattttcactttacatatgagctaaaatagtgagtcaagtttctgatggagagtttctgcagtaccgaacatgagtcaaagtattacaatcatgcaggaccatatattaaagatctactccatagttgctaacactaacttacatctctaaacgtgtttatattcattgacccgcaaagacttcacgtaggtgttcacaattgcgacttttgggcacaaatatttatataataatgaatgcctccttcagtagacattggtttgacagggtcatcatggtccttaaattttgcgcaatactcatcaatcttcccaaagatttcgaatagttgaattccaatccgtctaataaggaagttattgacctcatttgacgaacttaacaaaacaacgctaaacttgacatttcccttaccaaatatttcgtacaactcaacaagcaagacctcaatgaaattaggaatgattttgagaaagtttgccaaatcgatttccatgaagtcccattgaggtttaccatccttggcaccctggaatattgactcgttcccatacttgactattggagtttctagcttcccaccaaccttcaatattctgtagaattctcgtagaacgattttataattagtaggtgtgagttgcaactgtaaatcgcgggagtgaattaagtcaaacgagttggattctaaagtcgataaactttcagagtagaattcgaaattcattggcttgtggctgaaagatgcgctaggatcaggatattcgtggcggttcacatctgaatattttgcagactcattatcaactgctttggccatattgactaacttttccggtggcatcgacttgtattcgctaaattcttcgaattgtagtttcttaaaataatcatcaaataaaagtttatcggactcgacaaacgattgtttgcggattctggattctatttcggcgtacaattccaggtcatcaataatctttgggttttctgcgtatatatttgtttcaaaaacccgaacaaatgggacagtaagagcaagataccaaccatattggacactgtaaaacgtattgtaaattaaaacctttgtagactccggatcttggctggttatcttttccttatacttttcaaataaaccacgcagggattgacttgcgagaatgcagttgttatggaacttacctaagatttgaatattatatttctccaaaagaatatattcgtaagacactttggtaatcgaatgcaataatagattgactttagtcaactctacatcacagccatcacccatgtcttcctgtttcaaggagtacaaagcatctgcaatctttctgaaaaaatccttgtacttataatgagttctctcaacctcagttaatgtggaagggttgacattgctgggaaggttaattagatatcgcacgtagttagagaagttcacctgtaccaattcttcgttgttaattattgggtgatggctatgtatcagctcctccctaataagaatacgaagaaatttgcgcacattcaaagactcataggcaagaatactttcgtacgccctaatgtcatggtgttgcaaagtatcgaacctgttccttatagaactcgactttctatggcggtttataaatttaagaagtgaatgactccgaactctggcaaaatttattggatcgttataatggtggtcgctcaaaatgtcaagaaagttgttataacggaatatttgaaagctaggcgtgaatagaaatgcttgcatagattccaccttattcaaaacagacatcagaatgacaggtttaaatggtgcaatcaccgggtgaccatctccccgtatcaaagatgctgtagtaatttgtttaggcagctgagttggagacattttgatacttggggagaccagttgcttcgcttctttggggagcagtttcgcatctcctatgaagggactagatagttttctggagaatctagattgttttggttggccagttggtgctgcattaggattggaatgggaagatgacaaggaactgtttcttctatattttgtgttggaggtggccgacccagctgaagttgctgacaaagcagaattgttacggtttctatcaattggaatggcagccaaatcagagaaagatgaagacttcctggttgaggaaaacaaagaatccaagccatcattcttgccgtgtggtggtgttgagcttccagaatttgaagccaatgcatttgaaaatttatctgccaccacattggaagtttccatgttcgttgattcttcggatacagattcttcgattcctttggaaagagattggctcttcaccgatggagctgccgacgatacgatagaagcatcatcaggtgctgagtctgtcagatgcagattggtttgcaggcttctatggccgtttcgtttcttctttcgctgtttggccctatcttccttgtgcttatttatcttctgctgcgtctgataagaaactgccggaacaacaaagaaactcatgacaatatacgtctgtatatatggactatgtgatatgaagataaattacgaaatatgattcaatgctgtggaggagggtacggtaatgcaacttgatttcagggatgataattgaacgaagtcacaatttatatgagaacaattaaaatatctgggcaccagcaaacacagaagatggataaaacgatcaatgtaactcaaactctaaaggtaacgatatgctgaaatgggcaagaaaggaaagcaagtttgctgtgaatgactataagctcgggaaaaaagtctcctatcaaattcaaacgtttcttaatctaagctattcttacaatatatgcagcaagaaaaaattgagaggggaacgtatgcctatccactgaggaaatggtaatctcatggatctaattgctggcagcggttggggcttcgtattgaggggatttccaagatggccagtagtttgactcaatcgtgtcaaacgaattctgttcttgttttggtttattttgctatcttcatcgctaagctgtcaggacgccgagctcccgctaatcctatcgcctggatggttatcaacggtaatcggcgagatcacgtgctcgtctcaatgaaagcagtccaattattgtagaggacacacactccgaaacaccgagatcgaactgataggcgttaattgtcaaatattgcgaaacaacagtttaactggtaaatacctacacaaacttggcaattacattatctgtacagatttcctctaaatggtacaactacgtcttcgttgctcccaggttagcaaagtcggaaattaaactgctttgcgtacatgcaaagaagctgattcgtcttttaaggtacaaaaaaaatcggacacttcaaagaagtgagcttataggatgtaaagaattcagtcggaaatgtgcacatcgccatagatattagcatttgcaacatctgaggctaattttcagcctagaatcccaaagtattgtagaccatgatggctgcagcataaagtcatctactgacatagccatattctatatacaggataaaccgtgacaatagtcaggctacaaggggcccagggcagaagctcatctatggcaatttcatcactagaaaagatacttggcaagactttgggtgtacatttttgtattaaactgccagactcctttcttttcttcgtttcttcaatttcgttgcttacgttcattataatacagtctcagcatgttgataacaagcaaagactccgtcgcaccgaatctctccaagagaattatatactactccaataaccgtggctggactaatcacagatggcttctatggttattgttagctgttcctcttgttattcttctcttgttttatttgcttagatcgagaaggagaaaaaccgtagttggaactactcaagaacctttctacactcaggagcaaccgccagtatctggtggatactactacggggaccagggacagggtaactacccaggtcagggaaactaccaaggacaagagaactaccaaggacagggaagctcttatgtgcctccaccaatgccagctaagcacaacgctgaaacagactacaatgtcagcggtgatagcttcggtggatatggcggtagcggtagctacggtggctatggtggctactctcaagaccccaatgctcctccagaccccaatgctcctccagactactccagaccagaaggtccaccacctactcacaataaattttaaattctgaaaatagatgtacgcagatgaatctgctggtcatttgagattcaattggggctgatgaatagaatagttttgaggattattctttcagaaaggtacctgatctcttttcagtgaagataatgttgtcccaacccaatgaagttagtcttagccctcatttcttctactggtccgtcactttctatctatgtactaattttctacagggtttctttaatgtatagttgcaacaaatatgcttttcgttttaagttttccgtactcgtctttcccagcaactctaagaggcttccaagcggctgaatgcagatgatgatcttcggcaaatggaattcctgtatgtagttcttcacgaatgttattatctgacagcatagatcttagaggtaataagttcagtgcttgtaattggattagcgatttcctggcgctgtgtcaccatttgtctatctgagttgagaatacctctatttgttccctatattcgcgaaacttccaacagattttgtcagatctcccactggtccctatcgggtattgttctgaacattagtgcacagctgcatgataaaactggctgcgaattcaataccatgttcatcagcagagatgttccttatagacttttcgtaagccgagccatcgatataatcaattttaattcgagataaatagcgatatgagaatgaatcttctctacttttggtcgaagaaatagttttcgtgtataagggtccaaatctttgaaaactagtaaactgaaataaacgtttcaagcaaatagattttcgtctccagccagaggagtatatccagcaacagataagccattttcgctgatataaccgagcaagggtcatagtgatgccagattcttttcattcattgtttgacagatgcaatagccaccggcatataggtcatatcgggaaacacatcttgcggatgctgttgcgttatccgccttacccgctgtagtgaagttaaaagaagacgtttcggataatagctgcagcatccgtcaagtcaagactacccgctgttgaattataaaagaagtttatttccttattcatcttaagacaaatattgtattgcttttattctactatcagatttgcacagctaaattctacaattcaatcatggctgcaggtgcatttattcttggatccacaggcttgtgcgggtaccagatgcttcgatttgccgagaaatcactgttgtttgacaagatcagcaccgtaggccgtaaacttccagatttcaagagtgaaaaggtccatctaatccaagaggcagacagtgacaaatggcccgagatcattgaaaaggaagccaagggatacagcaccttcttctctggattgggtagcaccattggtgccgctggaagtgcagagaactttgagagaatcgactatggaattaactacgcagcagcaaaggctgcaaagaaggcaggtgttcaaacatttgttctcatttctgcccctctttcaaatgcaaattctcgctttctctatattagaacgaagggtaaactcgaggacgacatcatagcgttgaagttcgccagaacaatcattttgagaccaggtattttacttggagaaagagaaaaattcagaagcattactgaaagcattatagtaggcatctctaagtacacccatggtaacttcctctccgcattgactgtgcctgcgtacggagaggaaatgggccaaattgctgtcaacttagctctggaaccaattccacaaagtcaaactgagcctattgtcaatatcatatcagctaagcagattaccaatctagccaaaaagttgtaaccaaattaggcgtatggactccaccttttgaccattatcaattttaccccactaattgcaagatgtgcgttctgaaaaatttggtgacacagaacgaacttgggacccatatgacaaactaccagtagtaaaattattcttctatgaactgctttttatacatatttattatatagacccgtgattgggaccacaactttgtagctagtttctggcgtttatttgtacatagctaactacatttgcaatcaacataatatgaagaggaacttcaatagtgccgtcacactacgcgagaagtccagtggccgattactatattcgatcccgtcattagcgcgtatagtttacgtcagcagctacaagaagaagccggagccagacagaaccaagactagtgctagagctcctctgtcattgattgaagtagcttcatccataaaaattccaaccaaagttagtcagataatctcatccatcatcctcagccaaaatgagccacattctcggtctcagtttgtaggactggatgcgcacaagacagacatgatggtcatcgactccattcgcatcacaaccacaagatacgtgtttttcctcggagttcagggcaaggaacacatcgaagacatcagctcagcgattccgtctcataacgagaatgacgcagatactatatttgtatctagcaaccttttatctgtcaacggacgccatacgtctaataatatccagtgttcagaattaacaagctacttcaaaatacttgatcctttgggtggaggttcgtatccactagactatttggttataatagacggtaatgatcaagtcagatgcaaaattccgttagtgatcaataaccaaaatatatttcaaagaactctcaatgccagaaaggatagaagtggaatatctacacacttgacgtttggaatcagtcttgatcaactagccgggttcctagaagaatacaatcaatactttgcgaaccacggttcgtaacctgacaatataaagatgtctgtctattgtacattggtggtatttcacatgcatactacatatttacatactcactcttttacgatttaatgatacactttcaagaaacaacccaacctcttactgaagtaacgccaacttctcttgctccaaatccttgtactgatttcgctggttctctatttcctctctcaccttactgatgtatacatctaacctagccaactcatccatttcgtcagttcggatgaattcttgcgatcttttgtcaggatctgaaagcttatatggcaaaagattggatggcttgcgagtcaagatctcaaacactctttccgttggttcctggaacaccaactcgtcgtataatacagaatggacttctccgttctctttcgtagggtgctgaggattgaaaggatgtaatcttaacccatggaagatctggaagttcttctcatttactcctaattcagctccagaatggaaatggatcttgatgatgatctcaaactcaccccatccagtttcagttacttgatatggtggcttctcgattgatcgcacgggattttcgtaggtttcatgaagtttgaatgtcacctttttaattaatggagttaaatctatgttattaagaacgggtttgaagaaaactgtccattcatgagtatggtctgtcggagtagtaggcttccttttttccggagtcaaccgtatggcatggtttccatatagcacaggaactgatatggatataaactttattcttttactgccggaactcatgagtggtgactagtgtagatacaattgatctttgtagaacaaatcctgttttcaagatttctaatattttgtgccaaagtcgtgcttcacacataaaagaatggatgcaaaacagctttagttgagaaagacaaaagcccatcagtaactgaatacatatatctggtaacggttcatcacagtcaactatgtgtatatattctattaaacgtaacatattttaaaaacgtacatgctattcattagtggaatgtctttaatttactttggcaccaacggcttccagtcagacatactcttcggtatttctggtgtaacagaagctcctaatcttggaggaggtggagcaggtacagcagtttttgccttttgaagtggaggtggcaaatgggtttctgatttgcttacttccggcttcaagatctttggagcagccaaagtcgtgggtttggagggaaccaatggtttcacgttcgatggatgtgatggatgaagtggaggtatagtcctgtgaagtggtgaagccccattagattttaaaacaggagatgatactggcgacgaaatgttaggcgtagcagaattggatctgctaggaatgagtggtgttgtagaaaatccaaatggaggattgactaccctcggagtagggattgcaagacttgcatttgattttctttctggtgggggaggaggcacagaaaagccggtttctggaggtggaggtaactttctaggtaacgtggctcttccagttgtcaagtctgtggcaacctgtcttctgctagtaggaggaggaggaactcgtctaggtgaaatttcactttttaccgaagtgggtgttgaaactgtttcgacacctaataaattcatatcagacaaaacatcatgggagaaactgtttccgttagttttggggtccggactcttggaatagattgagttggccgcactaatgtctagtaaattctcaccaacaccgagatgttctaacttgtaactatcatacaaactcttagacatcttcaacttcttgtcttggtcgatgaattcaactttactgttgaatgtggcatatactggtttgtgatcactgacaaagatatccataacagagttatagttgagaagcttcaaactctctttatccttagctgacaaataaaggactctatccgtccaagatggaactctttgcttctcagatgtatcataatcagaagtgcccttatcaaacttgtaagtaggataaaacttgatcggtccttctttgaacccatgaaatgcacccttcagagatatttcttcattcaattgatcaacagcaagcaactcatcgaatgcaccatgttcaataagcgacctgcattggtcatttgctagcgagattctgtagttcaaatctccaaaccagatcacatggtcgtgatcttttatggtgtaatttcttgtgaatgtcaacccttgcatgattgtagaatagtcgttgaatctttcaacaactgcagtagtaccagcagccaaatgggatgtaattaaagcaaacgatgtagacccaaattcaaatcttacagcacaagctcctttgttagcagtcattcctcctaaacctgtcttccgtgaagatccggccacttgtgtgacattgtgcacttgagatttctttgcaaacaagaataaggacatagaagctattgattctgttctcaaaagcaaatattgttccttttgtgagtttaactgatcattcaagatctttgcccacttcaatggttttgaaggatcggcattcaacattcccccagcattgagctcaattaactcctggaaaccaatggcaaagatatcgggtagttcactactagaattttcgggtgggaacaaccatccagtcaaatcaacaggtctagcaccaggttccaaagcatttaaattatatgtaccagcgaataccgtaatattattccaagtagtgaatagattggactgtgttttcaattgttcgttgacgtaatcattgataggatcaaatatttttacaggtctcgttctggcatcgtagcctaataaaacatccatagttgattgtttcttaccatcaacaaaagtgttctggtacatacgagacactgatttggtaacgtcagacaaagctcctgcaaaattcatctttccagatcttgaaaacgaagacttaagggcatttgtacccgtgtagatttgggagatggcatcaccattatcggcccataatgaattgtgctttatgattatatcctcattcaccaatctatcacgatggcttccagacgattgattttgcaaaatactgtccaatacattcttgcaaataacttgctggatcaagtttgttctgtcaagacaatccaagcaattgactctgaacacaccatcttgacgggtcacaacttcctcttgttcaatgtcataaacgaaccaaccgaattgttcttgtgaatctctaagtaagggaaggatttttgttgctccggcaaaacctccactttgttttgtttcatgatggaaatcgaactctgtataggagatctcttccttacgttctgcatcgtcgtacaaatcacgaaatctccttgaaacagaaatttcagctggcttggttttggataacaagttcacaatatgacagactccgtacttttcacatacttctgtgaaatgtctatcgaaaattggctgagttgcttctaaggatctcgtcaaagtgatcttaggattaatcaaagttgaatcctgttcccaaaatgttggcaccgagcctctaatctgcgtgaatgaaaaaatcgaagactgagttggatgaaagtatataaattctgtctcaacaaagttggctacattaccattgtcatcaataccacgagcattgaatcttgttccagctcttttccatgattgctttgaaatcacagtgatagaatcttgagaggagttcaaagctacagtcttggcaaaccctctgattacagtagtgagaaaatggttgttgtccatggactcttgggcatagggatctaagttcgatctgaatttgagcaattcatccataagaaacgaattccacatgtactctttttggtagtgctctacagtcttggtaggtttggtacgacttgctccttcaaataatttagtattggagatacctctgttctgcaatagagaagtcaaatcaaagtcgttagaatagtagaatgagccattcgacaataacttcttcaactcctggcaaggatgtacctctctggcgtaatcgttgtcttcttcagatccagcaacagctattgggattccgttagcatccaagttagcgaagtcccattcgtcagaagctaatgatatgaaatcaacagagtaaattttgtccactgtctcatagttgactggattcgccacgttaagtatggcaccagtgatgacagccacaaatacctgatggtccaaatggatcaaacctagacatccaaacacttccctcttaatcaatgtgcggaacccttgttctttagtgacatggctgttggacgcaatttcaacattgactttcgacgctttcttcagctgtcgaagtaagagtgcgtgagtctctgaacagagtgcaatggtacgaggactgtccttatatagcaacttcattacactacaattctatacaaatatgcaaccgccagttgatgttgatgatgatgttgactggtattcaaatggagttgattctgctgtttctgctacttaaactgaatctggagaactagggttcatctgaaataccaaatttcgggtagagtgtgtattcaggaattttttgcgaaggaggcacaagactgctgagtgcgtctatttgaaacttgatctccatacttagctattcgaaggtagttgctttgtatctttataacgcacaattccaattgactcaattcccttggatttggatataaatacctttgtcgtatcttttatctggaggttttaacctggtttttattgtaagcttacccctattttaaagcggctccttgaatctattcgtaattccaacaatcagtttccatatagtatgccttcgtttcgacatccattatacgagaagttgagccaatacaaattcatcctcggttccacatcacccagacgtctagatatcttacacaacaacttgaacatcaaggacgtgacaataataggctctagcttcgaagagaacctaacaaaagaaggcatatctaacgaagaatacgtacgacaaacttctcgcggaaaggcggagtcaatattgactgatttcagagacacatccgaagcgacattgatcttgacttctgataccgtcataagttgtaatggagagatctttgaaaagccaggaacaaaagagaatcaacgtcatatgtttgaaaaataccatttgtatcctgacataaaagtcataacagctgtaacaattgtgattccagattcgactgacccactaatcatgcaagatacagctattaccaggttggttttcgatactgattgctcatcagagttagtagatgcctatatcaactcagaagaaggcttgcaagtcgcaggaggcttcaagttccaagaattaggaagtttattcttcaagggcatagaaggagactatttcaacgtagttggactacctgtagctactacttttcatttgttggaacaggctgtgctgaaataattttaaagcaatctttataaacaaatttagttcattttacatagacaaaatgaacatttacttatgaatgccctttttctaattagtattattttagatatgaagcagatatggtagctattactgttctagctcaactagaacaaattaatctatagcgattgcaaaaaaatataccagactgcacacagtcagtacaaatttaggctcatcgggtctgaaaaaatttagaatattgtgattattggattgtacgcttgctactgcaatatatttacagacggaacaagatggccaagtccaacaagaagacagttgtcaaggctgataccaagaaagacaataccgttcagaagaatgctgaaaaatctgtagaacaaattgaggccgacttgcagcttcctcagtcctctgatgaagaagttgaagaacaaaatgacgaagatgaagaagaccaagatgtgtctgaattatcagatgaaagtgatgatgaagacgaggacttgcgcggattgtcaagcgaagaagaagacgacgacgaggaggaggaagaagccgaaaaggatatcaagagcaagatcaaaagagatggacatttggtgaacaagacagttatctctagcgaagccagggctagcaagaaatccaagaagagaggtattatatatcttggtagacttccacaaggattccaagaaccagaaatgaagaaatacttcagccaatttggaagcatcataaacttaaaattatcaagaaacaagaagaccggtaagtccaagcattatggtttcatagagttcgagaacttcgaaatagccaagatagcagccgaaagtatgaacaactacttgatcttcggacatttgttaagatgtgaggtcgttgagactgctaacgaagacttgtttaaaaacaccgagaagaatttcaaggtaatcccatggaaaaagatctccaagcataaaaacgacaagcccaagagcaaggaacaatggggtaagttggtcgagaagtacgaaaaccagaagttgaagaagcaaaccgagttgaaggagaagggtatcgactttgacttgaatagcttataaaaccctgcatccaacacaatagcatatagtgtataatagagaatataagagcagcaacataattaattgcatgtcagagcaaactacggtgaagggaagcagagtgtttctactttctgaagctattattagctttgacgtgaagcagttatagagagcgtagatgatgcaatgttatcagattcggatctgtggcagttgcctactgtatgggaaaccaccatatcagatatctatatcagatggcgttgtcagaaggtacatcgcagttggtaatacgtcttctactatacgatggattcggagaagaggaacaatatgattcgttctcagaccaggctttacatgatctaagcaacggctctagtggccccaaacctaaatagcccaacccagatagctccgaaagtgccatgacatgcaaactggctgtgaaatatctttaccatattgagtatgagtttccccaccgtctagttgcaggagtgaacagagtgaacgggttggcttgagagaaacacaaagacatcgttggcgttatgtgccatcctgaaggtcgtttgttgagtgtgataaacgaagcattgctcagtgttggataatcacatgtagccaaagtcatgttcatgggcgcctgcggatgtttcaccagaaagggttgtcacaagatatcccaataggaggttagtgattagccataaagtgagtcgattctagtcatggtgatgtgataccccttcccagtatggctagaagcatcgttcagtattgtgtctggtggtgcttttcttttttttttcctttctcctggctattgcttatttcctcgctcgaatcaggaaaatcaaacgcagtaattttttttccgttatacgatgtgtgagaatatcgaataatatatacctggttcttttaccgatagtgattgtggatcattaaccttcgattctttttcgttctgttcgacactccttcttagaagaccccttgtattcttactctagacatatacctagatttagagtcaacactggaacatattcgaatatatatcgtgtttgttgcctcgtttatttatcctacttatttattcatttccaactacaactatggctactgaaaccttgaagacctacacttacgaagaagtgtccaagcataagtcccacgacgacttgtgggttgtctacaacggtcaagtctacaacatctccccatacatagatgaacaccctggtggtgaagaagttgtccttgatgtcgctggtactgatgccaccgaagccttcaacgacatcggtcactctgacgatgcccacgaaatcttggctggcttgttggttggtaagatcgaaggcggtgtcaccaaggaagtcaagtccattatcaacaccgaacaagaaggtggttttgggttcccagtcatcgctgtcgctgttttcttgattgcattcgctgcctactacttcttgcaaaacaactaacctccaaattctaacctttggacaggttcaggctggtaaagctataaattgccattcatttaaagctccaccgtttgttatctagtttatagttctgctctggaattccagaaataaacgtttcactatagagccttttgtttgtgagttgcgccttggtattgctacagtatactatgatcatatttatctaactccatctctttttagtgtctacaacttctaataactccttgttgtctgatctgtccagatgtttgttgtcgaattgtctttcgatcttttgtgtactgtcgcaacagccgatgcgtctggcaagattcctccatcttgagataagcgcttttttgcttctctagtagccctttccgcacaaaataatgcaatctgaagagtacggaatcttcagaaacggcttaacggtcggaaccttcattctagttcgttattaggacaactattcatagtactgactgtttctagtagcattttagtccctagcacgaacctcctggtgtatactctttcttgagcaattccagcggtcgtgtaagcgaaaaagacgacgatcttattggctccagcataatgtcatatgaaatttgcgttttggctgtgaaaaatgtacaacagaatttcaggtcacaagaaaacagaccataatgaagaataaaggcattcgtgggtcaacttaagaaagtagcctaactttgctctatacagaagcattctagaagaagcaaagaagcaaagaaaaaatcttgcgctagacagtttcatgcggttataccctgttatacgtgttcataatacacacgaaactgaaaaagatgtattagaaacagaatgccacaactgaatagaagcggcttaagttggcggaatcgtttgctggaaagttgctttctcacgactatgtaaacggaactgtcctacaagaggtttgtcccgctttccatgaaaaatattactatcctgtacttgtgaagtactatttggaagggaccagttctaagcaaaagcatagaaagcctgagtgccgatggccttagtcgtagtacactattgtagaaatttttctcgtaaacgtccctttctctaaatgctccaagtatgaagcaaacccaatcagataaacctatacacacaacttgctatttacgacttatggggcacttgtagtgaacatttgcaaatagcgagataagtatttggttgcaacttcctacacaaaaacctacatacttttcgcagcaactgaagacatcctacaaacacccaatacgctcctcaccaacttaatcttacataatgtgctcgagtagctttatgttgatgatataccacttctcatcagtcgacgggttgaagatggagaataaagatttcgaatctcagagagtttctgtagttgataagttatattgcagtaagtaagctattcatgttcatgtgaatcttgattcctattatcagatcaaggttttcaggaagtaaaattgataccaatggtttatttcaaaaatgattttcttcgtactgacgaatagtccaataatatcccagtgaacgatcaaatgacctctatcttattcagtttcatttaatatcaattaatcactattcaaatgctacgccatgtcttccatcttaatggtgttcatttgaccggtacctgtcaccaactatactttaaacctttatcatttccatattattgagctatctattgtccaaattctataaccacccggactatacccccatctaaaaatgggatcatcactggaaccaacactggatcctaacaaaacaatatggtacatcattgttacaactgggcatacccaacagcaagtcaattaacctggttggtattcaactctctcaaatcccgataatcaaggacatagacatacccaaggaaaaactagaaaagcattagtacaataacgcgttgggttctattggggccatccaacagatatacctgtggttattcggacccaccgaacacgttactttttctctaccattggatcctttttgccagtgtcagtttctgacatagactagtccatagaagtaccctaccaaggaacttagctgagagctgaaggacaagggctacagtcgttgcagtttttcctggtgttgctacaagagatactgtggaattgttgaggcgagagtgcacagagcatttgagctagtgttcgaccatcttggcaatctggggtatgcttgacttacaagaaagaacattcagcttactaagctagccattcaaaacattcttatagtctcagttgaccagacttctgtagatagtcatatcatgcagaaaccacgttcttttaaatttgcaattgtttgttctaagtattgatctgactaagctagattccgtgtagccgaagtttttcagttgcgggacggctatcataaatactcatgaatatccgcttttttatggataatttagtattgaatcatcacgatactcgtagatagtaaaatgcctcctaagaatagcattagattatgccagttgttaggcaccaaagaaccaatttggcaggctccaatggctggtatttccacggcaagacttgcagctgatgtcactaataatggaggacttggagcattaccattggctatgtttgatttgcgtaatccagaaggcttgaagaaacttgcaagtacggtagacgagttttcacgtcttgtatcttccaatagagctaacactgtgaacttcaacttcttttgtcatgatgtgtactccacagaaactccaccttcgcaggtaaagaattggtggactctctataaaaattcgttaaagacattagaagacagtttgcttagcaaaattccgttcgacaatggcaatgtttcttttaaggagatcgaaagggactatcctgaagaattgaccaagttgttggactatttagcagaggtaaaaccaaaagtgatatcgttccactttggacatcctaccaagtcgaccatagaaagattgcagaaggaaggtatcatggttgtagttaccaccacatccattgaggagaccaaagctcttttggacttgggtgtggatggattggtttgtcagggatacgaagctggtgggcatagaggtaacttcttggttggaaaagagttggatgaaaatttatctacatttgctttattttctcaggttcagaaatatgtcgccagtcagaataaggatgtgttcttgatcccagctgggggaatcatggatgcttcaacgatcaagtactatctttctcttggtgcaccagctgtacaaatggggtccatttttcttgctgctccagagacttcttcaaatggcttcgtcaagaagcatgtagagggcgaaaacaatttgacaactacaatgattgatttggtttcaggaaaaccagccagaactatcaagaccaagtttattgacagtttgatcaagaatgacaaattcgaacgtagcgaattacccccatacggccatgcttataatgcatacaaggtattgaagggcttggttaaggaccatgatattggattctacttggctggtcagaattaccattctcttgacccaaagttgaatactacagagattatacaaaaattgagcaaggagttggcacaggattagatctaaaatatatataaatatgacaatagtgaatttaacaaaaccatatagtataatagtcaagaaagtgaatttttttaaccatgaggaaagggagaaaaagaaattgttgcagaacccaaaattggcctggaccaacgtttctaattatgccttatagtattctacacccctacttagtttattcatatagcctccctagtatcccatatctagttgcaaattaaatacttagtttaaaggtcgtgtaaaagaaccaatactgtaaccaaaaattttccaccactatgagagagcttgactcaaaagaattctcaactgaatagcagacttctcctgtaaatctgcaaaaagcaccatatccgaaatgtccgacactccagccaacaaataccaaataaccttgtctgacgaatccaaggaaagaatcgccaagatcttggaatactccaaaaccattgcccattacggtttcattccatttgtgttgtacttgggttggtccagcactccaagcaagccatccttgttcaacttgttgagcccattcccatctgcctagatgagtagatactaggggccattggatgatgtataatagttatatatggtctaccagaatgctcctattgggtaatgataatgttagatgagcggtttcttgcttttatttgttcagagatatacaatattgtattcatggaattagagatgccattcttgtcagtctgacggcgcaaaccaatgtgatgctgatgaattcagcgataccatcaatgatatccaaggtatatgacattttattctccagagcgatcttcattttgttaatgatgtacatagttaattacaagctttcaataaaatacagaaaacttaggaatagtgatgtcactaagggccaacaagaagattcccttctagtagaaagtaaaatgtaattttgacaatctgaattccgagcaccgacgccattttggaaaagtattctagtatgattttttcgatgctcattatgttaacttaatattattgttctcttctaaaacaaaaatattgttaccattactgaaatcccttttagcttctcaaatatccagaccgaaagaagccgattcgtttatagaaagaaagaggaaggttaaatcagttctgtatgaatacattcatagatcacgatggagtggtaccaaaggaatctctacagcttagccgaaggcagatagaagcgacaggaggactcacagccgggtgtatcacaacgttagtgacacatccgttggatcttatcaagatcagattacagctatcgcattcacatccaaggggcacaagccacagagcgtttgaaccgattctcaatatattcaagaagataaatgaagatgccttacaagacttcaaaaagactcaaaagcttctggggtcgtctcaattgaaaaagttcagattgacacatctattaaggcattactaccgtggaatcacccctaacctagtcggaaatatctcagcatgggggttatactttacattgtattctgaatttaagtccttgcaattcaccagtaacccatctgtcaactacttctcatcgtcaacactagctggcatgtctacatctttactcaccaacccgctctgggtgcttaaaacaagaattttgggtagttccaagaacgacagtaaagcttacaaatcaatcgccgatggtgtagtatcgatattgagaaaggaaggggtattaagtttctggagaggatctataccgagtttgtttctggtgttccagggaagccttcagtttaccttctacgataactacaagaattttatcctgaaaaggtatgatactgaacaattgaccacagcccaatacatatatggatctgcattctccaagatcttcagcatgcttataatgtatcctacacaggtggtacggtcgatattgcagaattaccaaggagatagcaaacaggagagaacaattcggtctgtggcgaggcatttatggaaagaagatgggcccagagggttctacaagggtcttagtgccaatattcttcgtgtagtccctgcaacttgtgtgacgtttgtggtatatgagactgtgcgtgacaacttgagaaagtatgagactagggaataggttatcacttgtatatagaaagggaataattagatagagatatctgtatcatatatattacataatagacagacaattcaagtgtaccaatttgattaagcaagtgaaaagcaaaattttagaattagataccaaaaaaatgacaactgtggcaatggagattttcataagtaataatgtctgtaaataataccatataatcacaatgtgtgaagatggctaggcaaagtaggagtttaaagatttgtcaagcatatgtcaaaacattgtcgcaactcgtaaatctgcgacaagcgctagatctaagacaaaacgcgtcgtacataaatatttgcgaaaaatatgggctttcaaatcaccaacatatacgtatagagacaatacaagctagaatgagtcgaccactgtccgtggaagctcctgagctggaaagtgcaagaaaaaggaggaaattggaaactggcacggcttcagcagaagaagctggtgattcaagaccatatcctttgtcagtaacaagcatagagaaccattttgaattcaagtcatcaacatatcattcggcaatccccgtagaagttctcgagaatccagacgaaccagttgtcttgggagtagatgaagctggcagaggtccagttttgggtccaatggtgtatggcattgcatttgcattggagaagtatctgacaagattgcagaaggaatatgggtttgccgattccaagactttaaaggaagagaaaagagatgaactattctacagcatagaggatgaagcgaatgagcttaacagaaatgttggctgggctactactacgatgacagctagagacatttcttcagggatgttacgttcagttttgggaataggcaactacaacttaaacgaacaagcccacgacactaccattcagcttatcaaggaagttattgccaaaggagttaatgtgaagaaaatctacgtagacacagtaggtccccctgtgacgtaccaggccaaattgcagaagatatttccagaaacggaagttacggttgcgaaaaaggcagacagtatatatcccatagtaagtactgcttccgtgatggccaaggtgacaagagacgccaatatcaggtggtataaccacaatttggatgtgttgaagggccacaaattgggttcaggctatcccagtgaccccaataccagcaagtggctcaatggtaatgtcgacaaggtttttggctggtgctacgggtttattcgattctcatggcagacagccaaggactcgttggtgaaacacgacggggtagaggtgatttacgaagatgaatgtgtaaagcaggacaatggatatggcaatgtcagcgagtatttcagccataaggacgagcctgtgagagggagcatcgataagttgtattatagtagcggagtgaaactttgaaagaaccagaacaaagtggcatattagagagagcatattagggagagcatattaagagatagtatagcattattacacaatagaatacacaatagcagatatacgtagacacagacaagactaccacatacacaaagcgtttaggctgccacataaacagtacatagagtgaatcactttccacacaacactcgcaaacatccacgaactggactgatgcattctgtggatcttctccagatcaatgtgtttccgcaaatgttgaacttatatttcccaaatactgactaatgagtagaagttgcagccatggcccggagatgcagccgattttttccacccgagttcggcacttaacgtccgcaccgctgtctctgtcgcactcggaaaacatccatgcgatgtgcaggccactacctgcgcgcattgatttcagcgaaaaaaactactctggatagaggctaatctaccaagtggttcgtttgactaggtctttttcttcaacagttgtttcttcttctcgtgaattcagcagacgttgttcagttaccgagtctcttccagcccgttcacagtaccgcgtggatctccattgacactacagccatcgttttgtactacacgtcaactgtctagcactgtatcataactcttctaccataactctcagtatgtctgccttattgtctgtctccagagctgctctctcggttgctcgtgttgcttcctacaaacaaaccgccaccgtctcgctccaatgggccagactctactcctcgggcaaattccctcctcacaccgtcatcaacatgcctgccttgtctcctaccatgacgcagggaaacattggctcgtgggccaagtctgttggtgatgagttgacccctggtgaacctattgccgaaatcgaaaccgataaggcctccatggactttgagttccaagaagagggttttttggcaaagatcttggtcgacgctggagctaaggacgttcccgtaggaaagcctattgccgtctacgttgaagaatccgccgatgtcgctgcctttgaatctttcaccgctgctgatgccggcgaaggtgaagccgctgccccagttgaaacaccagaggaagctccagctgcaaaggaagaagctccagctgctgtttctactccagctgctgctgctcctacttctgcaagggctcctactgacagaatcattgcttctcctttagccaagaccattgccttggacaagggtatctcattgaaaaacatcaagggatctggtccaaacggcagaatcgtcgctaaggatgtggaaaactacaaggtgccagccccagctgctgctccagctgctgccgctccagctccaggtgcttcgtacgaggacattcctatcaccaccatgagaaacgtcattgcttccagattattgcaatcaactcaacaatcgccttcgtacatcattcagtcgcagatttccgtcaccaagttgttgaagttgcgtgcttctttgaatgcttctgctgaggacagatacagattgtctgtcaatgacttgttgatcaaggctatcgctcttgcttccgtgagagtaccagaagtcaactccgcctggttgggcgaccaaggagtcatcagacagtacaacaatgtcgatgtctctgttgctgtggccactccaacgggtttgatcactccaatcgtcaaggatgctcacatcaagggcttgtctaccatctctaaggaagtcaaggacttgggtaagagagctaaagaaggcaagttgtctccacaggaattccaaggtggtaccatctgtatctccaacttgggtatgaacaacgctgtcactgccttcacttctatcatcaaccccccacagtctgctatcgttgctattggtacaaccgacaagaaggctgttccatccaacgtcaacgaacaaggattcgtctttgaagatgtgatcaccatcaccggtactttcgaccacagagttgttgacggtgctgtcggtggtgaatggatcaaagcattgaagaagatcatcgaaaacccattggaaatgttgatctagacatctcgaactggcaaaaccatccataacatataaacatataattacgagaaaagtagaattagatcgactttattctctagtgtagtgtttgttatccatttacctctgcacatatattccataatacactatactaaattggatcacatagatctggtcgaggatctttcgtaaccagtgcaaatcgatcttgtctatatcaatgtagttggtggtagcgctacattttttgcacccaatactctcacttaccgtatacttctacttatcacgtacaacacaacagaaggtctaatacgtcaatttgtctgtataataatgtatattcttgttctttgttgttgattctaaaatttttgaaattatgtagcttttataggcataagtgtatcatagttgccttgaaattagtgaattatatctcgagttggttctattgtcgatgtttgcgtctacttcatgtaaggctagcttcttcattctgagaattttcttcgacctgtttctttctaattctaagacgggcctctttctttaaattccacaagaatactgggttttttggactcaactcttcttcaatatggtgtctccgttgaatttctaaccatttcttctcaatagcttgccatttttctacttgtttgcgctttaactcctgttctattctccattcatcaatttcccggcgaatatcctgtcggatcacctcttcttcttttctcttctcatactcctccattgcttttctgtgtatcttttttcttaactgttcatgatcttgtatggcaaatatcagacggactctagattcggcctcccgacgatagtaaccctcatacctgtgcaacctttcttgaattacctttcgatctctatcttctttaatctccatccattccttatattcatctacctcagtatttttcttcttcagactttcttcattatcagtcttctccttcttctggcactcctcttcatcatcaagttcagttagctttttcttgagatattcttcataataatcaatgtcaattcctttcttcttcggatacttactgagacacgacttaagaggtttcatatttaatggaactggatcatgacgtttgtaaccatatggagcacgctcttcaaatgtacctctccatgagaatccaatctctactccagtagactcatcccgaatcactggttgttcaaccaagtcattgagtacccttttctccgattctccagtataaagttgtacaaagcggacacgattcctcctttgagatccatttcttatatgaattgaatctctcaggtcatgttccaaatcatttaaatgagctttgaccctaggtttaaactgcttgacggcatctttccacctactagaatttggcgaatctggggaagaagcattaccagtaaaatggcagagctgatccaatggaactatatccttttctttgtcaaatgcaaattgtataggtttgttttcttgtctagagtagcttgagttctcagattcctcgttagtctcaaaatggtctatataatcattcagatcggtaaaccgatacttcctgtccgtattggacagagattcttcacaaggttcagattcttgaaatttttcatcttcaacagaattactaggctgctcaattcttacaggttgtacctcatcacgctgttcatgctgttcgggtttgtcaagtttaagtttaatctcgagttcaagttcagttttattggtggattcatcagaccgagaatcaacattacagaacttcctttgtacttcgctgtatctctccttcaactttttatgtgtttcttcctcccttcttaacgactgccgatatctcaactctttaacttcttcactttcattttctaaagcttcgactctcatagctcttatgcgtgccaatacactacccaattgattctctaaactcacctcgtattttccttctggataggccctcttgattttgctgaaacatgatttgcctggtcgcaaatcttttagaattgaatgacgcctcctgacaccacaaggaaagcgtacttcataggttccgatcttggtaaatcgaaattctattccagtagctttatcaatttttgaatgccgaatatattgctttttgatttctttattgaagtgaacttccctgatttgattcagtttagcattttgtttaaacaacaggatgatgttacatgtaaagtctctgaaggggtcatcactacaatctggttttggatccatatatgtgtctgacacggaagtaggtctggtgctgacctcatccaaattgaaattattgtcgtcaaatgtggtactttcagtgaaatcgattgaagcagttgtggataccgagggaatggcaacaggagtccaaaagtgaagcttcactccagaatttgtttctgaactcatatagtcagacctgtcagattcaatttgtctgcgagcaagttcagattcagcagccgatccaggcaatctttcgtaggtaatagtttcattattcagaaatgaaacaaaagtatattgtccatagttgattacttgcttaatgcctggtacagtcgaaagaggctgtttatttgcttctgcttcaacaatagcttcccaaataccttcgaaaacatcactatcattaacggcaatcccaatgtcgattcgtctgattgttgcttttcgtgatccctgttctgatctatcagaagtttcagttttatatgagcattcggttctatcagaatctacagatatatcagaatgatcggaattcacagtgtgtacgcaattaacaacagggaaaatatttagattttcagtaaaatctgcttcggttactgtactcgaagtaacacaagcagaagttatactagcaggagaagtatttgatgaacttgtatttagttgatcaggaaattcagtggatttctctttttcagttgagtcaatcaaagattgcctcttgaaagagaacttgtggaatatgcatttgatcccagaaacaagcttttggacgatgttggaggttttgggagcaggttttctttttctttctaaccttctcaaattcttttccttcttcgatagcctcaatttgggttgacggatttgatctttttgaccgttttccaaagtcgatgattgatatttttcggaaggcaatagagtctggggttcattagaatgtctttggaaagctttcgtaaatgaaactttccatttccagttagcctttgcaagataaactgtcatcttctgaagttgtttaataatcaggggttatgctggtctagaaaaaagagtagttcagaaatgggttcacaataatgaaactcaagctcaccgtgaccacccgacgaaatgcttacggagtaaacggcaaattgattattgctggataagaatgaatataagccaggcatattgctcgtgtgaaacttgctatatttgattacagttgggcggtatttgcaaccacaaatcgagcccaattgggtgcaaaaaaaagatgcatcctcttgcagcaatatgcatcatgcatacagttctagactcttagatatactattttagaaacagtatagatgtcagaatctttatagaattatctgcacttgcgatttgcttaggtctgattgtataggaagtgattgttgcgaacggatggatcatagagctgagatgcctggaattttcctagcttcattggaagacacttatccactactttcgattacgaaacctgagtgaaataagcttttcggttactctgtggttgcaactgagtttaccctgtgaagggagttgtagttctcaattcatcaagagtcatatcgatctactactggaaatccctaaaggacaactttctgtgggtaaaaacttgtcacttcactggttgttaccgctcttaatgaaagcgttgtcaccatcaaaagctcgtattgctataaatattttcgatgcaagaagttcatagttgtcagtattgatttctactaccatacatctttggcccaagctctttgaatacactatgtcgacttcattagcttcatttgtttacttattatcatcaaacttcatggagagattcagacaagtatatgagtaaggaagattactaactacctctggtaagcttaatttaattagcaatctctgtgactatttgcactctccatgtccacgcctagagatcagtctgccagtacaggtgttggttctcaatcaaacgtgcctttatccgcagcaagatctcgtttcgtgtgccgttctcataattcaagactagattatgtttttcttctcaaggtaactttgacttgtgacggcaatgtacagaaacaacaattccaaatgtcagtcttgattcgatatcaagtttgccaatctcatctcttgatctgaaactcaaggatgcctttacattcttcattgatgctgcggtgtggatgtttaagctccacagtactccgcgcatcaggtgccttattttcatacagtagtattttctaaagagttggaattatcaacagtctttattatatttacttcacttctccctatagattccacagtaatttttctgtgaaagcctcatatatatccgtataccagttgctcatatggctgttaagcagatatatatcgccagacacggataccgtgccaattggctcccgcttccacatccacccaatcccacgggaatagatagtgatccacctttggcacctcatggagtcgaacaggcgagacagttagctgcttacttgacttcgttgccgagtaccgatagaccgcagtttgtggtatcgtcacctttctaccggtgtgtggagacagcggagccaatttcggaaatgctttcgttgaaggtagttctagaacgtggagtaggtgaatggtacagaaagggacgtaaggtgattccacagccggccgattacgaccggttgactcgattctttcctaaagttttggttgacgagtccgaatggccccgtgacacgaccgtaggtgtgattccagatcccactggagagtccaatgaagatatctttgtcagagccaatgagttctggaagcgtttcttaccagtattcgaagaaaagtatccagatattgagacgataatgatcatcacccatgctgctaccaagattgcattgggagcctctcttttgcgtttatcgggtgttttggactacattgatgacgataacaacacgtttcgtgctggagcttgttctttggataagtacgtacgtaccagcgacggctgggacatgaagatgaatggaaacaccgagttcttagcgggtggagaggagatgcactgggactttcgatcaacgtatgaagcgggctccgacgaagacatcaaggcacgggcagaggaagctaagaggaagaaagaactacaagaaaagaagagggaatcgtcatctattgcagaggcagcaatcagagacgacaaactaagtgtcaacgacgattttgaggtacgtaacaaacctagattctaatcagagtctaccagagtcttctagacaaactagagtcacctggattctgttagagtatataccaatcataataaataatcttagtgaggatgttactaacacaattttaggacttctacgtgacggtcgatattcccatgatcggaaaggcccagaactttgaggattccaacaatttggagaccccaacttcaaaagtcaatattatcaagccggcagcacagttccagattacagagttgaataacgacaaccccttgatcaaattgtcgaacaacagcactgctcctggagtacaggacaccaacaacggcaatgatgctatcaacagcatcaatgtgatcgacggaaagatctacgaaaccagctggaaaaagttggttggaacagacttgatttttgacgactacggtgaattgataggtaaggtaactgaacacttgaccgtcaatgagaacgtgaagattgtacttaaagacagttccaagaccaaagaagacagcgacgaggaagaagaggttgacgcgaatggcgacctcaagactgctggccaaagcgctttcttgaaacatgccattaagctcgctaagaagaaagaagcgcactcgtaggaggagtataaattcaaagataaattatatgtattagtagtctaggagtgtttcatactttttaatagtaataatgtacaatataatgacatgcaataagcgaaaagattatttctgagctgtaactattcgttgtatatgttccataaacagctgcaaactggtatcgtctgtgaaaacatcaaatctgtctccaaacccaaagagatggttaggattagtggcataactagtagatggatttaacttggccataaggaatctggcttgagatccaccttcgtcgcaatcaataaaacgtggaagcgggaatctatccatcaagatttccatagcctccttctttggagcctccaagaactccttgaaatgaacgtactccggctgttcatgatatccagcctttctccattcagcaacctttttaccgtggtgaataaggatatggaagaaggtatccaacaataggatcttggaatgccccaacgacaacgaatccaacaatacgggctctggctccgtaatgactaaacccgtagtttcatcaacagctccaaaagtatctatatcatatgacaaaagagtcggttggatcatgatcaacgagttattgacatcttcatgcataaacacatgtctgacaaaacttgtttcatccggagagttgttgaacacatttatgaatggagatctcctcaaatgatacaagaactgaggtaacaaagcgtatgaggacgaaagtctgaacgactccaagattcccggtgtaaaaacagagaacctagtacagaaatccaccaagttcttgtccaagttcttgaccacagctaactgagtgatgattggtttattctttgcattggtattgtctggctgcatcttattaatggcatctcttgcgagcaagacaagggctgcttcctgatcaaaaccacgttccaaattcacaatatcagaatccgggataattgaaagcggaactgtggttactctcaatctcatttcacccgatgcatgttgatagtgaaagagaaattggacaaatgcaaaactggtgaaacctgagtccaatttctcaaagtacaatgcataagtagattgagggttcacattacagagcttccaggagttggtagacccttccccaaggacagtttgggacacagttttctctgcaaaaggattatcctttctaactggtaaagctgtggcattaccaatgagaccttcaaccttgaggtcggaggtagctctcacttccaaggtggcattgaaacccatatccaaatactctgagttgtcttcatcctgtttcttgaagaacttaataaaactctgcttgaatatagctgtactgaaggagtcactcatgactactacacctccagtcttgtagcagatctcgtccatttcgtagagaccaacttggtcataacttccaataaagaagttacagctcaaacccatggacaccaagttcagggtgattttcttgtagaaagttctagccgacttgaataaagacgtgtccaccttggttttggtcgatgtggtaggtgcagagggcaaagttgactgctgggccttctcgatatcatggtgtgatctcattggctctttcaagagattatctacaatctttccatatccagaagtacaggcaccgccaataaaacagagaagatgccccccagtagttttgatatgatctcctagcaaggcattgagcaaaagagaagctgtattcaatgcagcgccggtagctctctctggtctttctttgaacttggaatgggggaatgtattagtagccaagttctcgattatgttcgtcaactggtactctacaatgttgactggttgtaagaactttcggccaatagtaccaaggatgtcgtctacgcccgagccgtgggcctgtctgctgtgatggatattaagtccaggcgcgagcaagcctagactcttcagaagctggtccaaggtgtactccttcgagccgttgaatgtataggctcggttatcgttggaaagcaagtcgtggatctgtacatgtttgccgaaagtgatcaaacccaccaatgcattttcggggagaagactgagcgaaatgatcaacgactccttgagtgactggaactcctcaacatcatccgcaacaaaacatgtatctacgacatagaagaagattggtggcaaagaactaagccttcctgtctggtattccacagtggagcttgtctcgtgtaaggccggaggaaggacgtagttgttggtgtccggatcgatctggttcaagactagtctattggtgaagccacagaaaggacaagtccatatttcattgttgactgtgacaaacgggttggctatagcccgacattggcgacaggctagcatttcctctttgggtaacacctggatgttggacttgttgttgagcggagtatacatggctcccaagggcacgacattgcgctggtgctggagtctcagcttgggaatacagctgaatgagagacgaactccgtctatttcttccctggtttcaaagtccattgtgattgaaggatcaggagacgattgaacccatacagtgtactatacggcaatagactctttggctatatccacgaggctggagaagaaaaagttgacaaaaagaatagaaaaaccagctgaaaaatcgagatttccacagtgagaaaccgcgagattttcaaatctaaaatctcagtctaaggctgagatcaaagtgtgtttttttttcgcactcgcggataaaccgttgcgataacagaagaccgaaaaaagctttagaccgcgtgatggaaaaccttatgagaagattaatatctctttagaatattggggaatttggagagatttatactccgaaaggaaaggccgtggaggttgagaattgtatatttgtatagtgaattgtaagttgtagtgtgttgtccggttttccggcggtctctggttaaagaacggcttaccaggttgtctgtgaaactgccattgtcatattcatatctttttgcaactgccgaggatgcaaagccgagaatggagatgtctaaaacaattactagtggctagaatcataaaaacaccacacccctactttgtctagagattcgtttcaggacagcttaatagttttcgtaaagtactttcacttcaattgtcacattccttgattcgaagctcatcacttatcagaagatgacttttgtgtcgctatctttttcaaaccttccacactgaagcaagtgaaaaaaacctgtacaatactgtcaccccccatggaatggtatttccgctagcaggagataagaaggttagtaacctctcttcaaagctatggttcagtgtgttatatactcggggtaagtacaagtccactaagtcggaacttttattcaggagtatttagcgttattttctaccgttcgtggtcgaccaaagcctttttgcacccattcataattttactttcactgcatcaccagccgatgttagaatggctccctcgaacgatttaagaagaatatgtaatcaaagatttaataatttccacctgagagtatccaatcatctttgaaccaagccgagagattgtccattcattctctagtctccatttgaccatatcttgcaatcaaaaatgccgacaggacacaaacagtcaacaaattgtaatatcacctgttgctgcagtatctgataccataatccagtatacaattactaattaacagcttccattgcaagaaatgttttgcgtttttgcttttgacaggagcggaacagaaatcatggtttaatcgtttaaggtgcttcaaaaattactactgatgtccaacgtataaacttcaatactatgttaaagtcattcagaaggatttttccaacatatttatagatacatagatattttagaaaattgacgctacctcgtcaccgacttcgtgtattgttagacgagggaaatttcgagaatacccatttcggaaaatcagtgcttcaccgtcactttgggtggactgaagtcaggcagtgatctgactgtagcgaatcaccaaactcaaactatcctattaatgggacttttctcttttcttctctggcggtggagtgaagtaagttctgtctcacttatatcaaagctccaattacagctatatacccttcagtactataatattcatggaaacttacattccgaccacttttttggaccaacagtaactcagacgtgaataagtagcaaggtggaaacagagttgtaaagcataccccaaacttcaagcgcaagtagacaagattgcggcaaacaaatacaactttaactacacttgcgtgaattgaatgtcaaatgccaaacttctgtctttgtatccacagttcatttccaatatgaatctactgagatactaatttgagcagcaaaattgcttaagagcagagctaggaaagctctgctctcaacaaagttgaaggaggttagccaggattcaaattctgtgcaagttttgaatcacagtggttctggatatattccacaataatacagatagaggaaatcaaaagatggaaacactatgaaatttctaattataaaggttattctgtttaatcgtatacataaatatcagaagacctagatggtaacaattgatttgaattggctgcgaaatcattgcatttcttcttactcgcttttattaatgccttaatggcttacaatcacaattcatatttcttgaaattcaaggcagaaggatgtactctctaagctttaggatatttcagtacgaaattctgactctcttttttggtgttgtttccaagaactggtgctgcaagtagcaagactcattgagttaatatataaaggttttcttagttaggtatatgcaaattgattccaacatacaacttcttctctgatgtaatattctccttttatacatttgaattgaactttagcaagaggaactgtatgtctttattcatacttgttttccgttcactcttggtctatccttttctttggtgtcaagttgcaaatttagtagtgtacttatcacgttattgaatcagtatcaccaaaagacaatcctgcacgtatcctaaaaaactattgacaatctacaatgtcttggttggctctcagcaactatggagatcgtcgatagcacgttcaaacacctctgagagcattgataacatgttgagtggttatctcagcagtgtacgacttgccaatgcttctaggagattttcaggtttttctcgacttcgatacactcataatgtgaatttttcagctgaatcagacattaaatccgctgaagcgcttgactatcaaaacagaaaagatattatagcatctgacccttcctcatcttatcctacaattcgtaatgctcgagcaaatgtaagttcgcaggctgagactatcagaattccaagcttcagatcgaagtttgaagatgtagatttctcccagtatgagaataaccgctttccaggccagacattcatagtcgagggtaagatcgaatcgatccgaaaatcgggaaaagcaatgtattttatcgatattcgacaagatggacaacaacttcaagtcatggccagcaacaaaagcatgggaatcagtgttggagagttcaatactgcccatcaatcactaaagaaaggcgatttcataatgtgccatggttttgcttcagtgaccaaagttggggagttgacaattaaagtcgatgctccattgacattattgagtccatgtttgaatgctattccgaatagacttgtggatagaaagaatataaatgcccagcgtgttttgaactacttggtaaaccgagattctcagacacctattcttgtcaagtcttatattatccaggccatcagatctttccttctccaaaataatttcttagaagtgaatacgcccatattgagtggagcgggtactggagccaatgcgaagccctttgccacagtagcacattctatttcaacaaccgatgcaaaagaggctgcagttcaattacgagtagcaccagaattgtggttgaagaaattggtcattgggggcttcgaaaagatatttgagatcggaagcaatttcagaaacgaaggcatagattcaacccataaccctgaattcaccagttgtgaattctaccaatcattcaccagtttaccagaattgatgcaaatgacagaaaacatgttcaaatacatccacgaagatttgattgtaagggcggctaaattacaaagcattacttctaatttggatgcgttggattccttcactcgcccattccccaagtatgagtttgtaccaactttagaatcgaagactgggataccgcttccccaggagttgacatcttcaaacatgatagagtattaccagaagttgaacctaccagttcctgataataaatctccagcaaatcttcttgataatatttctggcatctatttggaatctatctctaatgaatttgaaaatgtgcctgtgttcatatataaccagccggcagttttatctccattggctaaatcggctgatgtcacatacgatggcggtcgtacgtacgatatttccttgcgatttgaattatttatcaatggaaaagagtatgtaaatgcatacgaagaagagaattcaccgtttgaccagcttgctaagttcaagttgcaacaggaggctcgtgatgagttcaaagacgaggagatgttgatccctgacttggagtacatcaaggctatggagtatggtttgcctcctactggaggatggggttgtggcattgatagattggcaatgttgtttgctggagtggatagaatcgactctgttcttcctttcggaaatttgagagatgtcaagaagcaatgatgacatgtatatatattgtaaatagaacacgaaaagaaagatttatcgcgaaatgggtgcaaaattgcgaccattgacaaaaagttaatatataatgaacactttctggagcattatagatgaaggcactgatctaacccaatattggacatcactgaaacatcaacaacaagattgctggatctttatttacactatagtattagtgaatttaagaatagaggatagcgtgtcagttaggctaattataaggaacggatatagcgccatgtacattgaacaatacggttcaccggctacgccctttcagaaaccctaagaaccactggtgcttgggacattgaatatatatacctttggacagtgcatatacaagcaactatcttaagcaaattgtctgtcaattctatttgaaaatagaccttcaagaaatagaagagtgcttatcaagacaacaattgaagtgtggagttcgcttgttggatgataagaaattgaaatctacagaagttcttctttcaatagtaaacgtgcattcctgctgcatcaggtttataaagagttttcgtatttaagtaataagtcaatatcgttttgatatttcttatatttctcagtatcaatattggtactaagtggaggtcttccagtgatacaatctcccaaatcgtaaatttgtttgagggtatacttaactccatagacattgaattcaccaatcatcatgtttgctcttgtaacaagatattgtaaatcggctgcttgttcaaatttaccgctctcatacaatttcaaaagcttcaacatggtttttggaaagattccagataatccgtcaatcgcacctttgatattaaccgaaagggctggaacaagaacctgtcctaagccagtgaatggagtaaagttgtttgccagtaatattggatttttacccaataatgtatatgtatctaaattgaagtgagtcaatttcacaccaacaataaatgggtgctttgcaagctcctcaaaagtgctaacttcaatatcaaccccattgaccacacctggatagttatagatcattattggcaaactgcttccgtcggcaacaattttgaaataatcaataattccttgttgagtgactaacttagttccaaaataacctggaaccaacacaataataaagttggcccctaaatcacttgcaatttgtgactcttcaatgatgtccaggtagttggatggaggcattccagctataagtttaaagtttgagtctggaattgcttctctgattgcctttaaaacagaacatctttctttcattgtcatattagaagcttctcccattgatccagaaacaacaagtccgttgataccagattcgtacaacattttggcatgtttgacttgtgtttctaaatccaaggaatacgagccatcatccttaaagtaagttgggattggggtgaaaataccctttggaataacaaagctattattgaaagtcatactatcaattcaaactgaatgcttctacacttacgtcggaataccacttttttctacgattcaccctcatatataaacatatacaaatattatatcaaagctccgaaagtcctcattcttccaaagaacacacattgtctgggtctataagcattgggggaggggccaagagaaattggtggggttgttgagaacagggtcagaaaaattaatcttttctttgatactcgctacccccaccagttttcaccccgccattttacacctcgacccccacaaaatttctcaggaacataggtctactttagacaaggaggcttcaactaaaatatctacggtatccgaaaacattgaaataaatgtgtagtcacaattggaaaattttgatgagggtacaaattttaacaacctcggtcctctgttcctcatggtgagtaatttgaattagaaaaatatgtaactcggattgtcaacttcttagaatctgatctttgtgtaaagacgcttactattgataaatggtgttaatgtattagttatataacttttatgtaaaagcttccctttcttttcccgtacttctcaaaatacaattctcaattagcccggcgtactctcggcagatctctgacctacaaagaatgtacttgtttttgaataatttcaataacccaaccaaataatgcttattcggaatatcatcaattactttggcacacttttcaagacttttatagtccaatgacttctggcccgtacccttggtcaatgaagaaaatattctactgatataagcgtagccttcttctttttcgcttacgacgttctgctttgcatatctttgatccaatgactctggtccatatagggaatagttgtaaacccaaataacaaatagtgatgatgccactatatttggtctgtagagaatgggatcagagtctgggtcgtaaaccgattgttcttctccattgaacaatatttcatttaacaatatgtaacaatgaagaactgatatcttcccattagcagtattagcccattgcttgattcttccttctactactttgtagtctctttcagttgtcttgacactcattcttctaggtgacccagcatagattagcatatcatattgcttcaccctcatgaatgcctgacataagtgatagataggaaatttacatttggtatcgttcacagataacccagagcgaacagaattcgtagactctactgtcagaggtaaatagaaagcatttctagtatcacaacagtctccaactgcttccctccacacctctatagcattgtatattgtcgatttccacgattcttcaactgatttccaatccaagaatgtcatttgaagatctttttgttccatctgaaatttaatcgttaacaaacctgccaaaagcaattttttacttagtgaacttgcttctgattgttcctggtgaagcaatttggtcaatgcaacaatgaaccttggagtttcagtctgtggtggcaagttattattgtctattactgacatttcccacaacatatcatcacaaggcatcagcaatttaatttgatgggcgaacaatacgatttcatgcccaaaaatagtagcatgaaaggtgtctaaatagaaagacacgagagcagccctctttaatgactcaatctcaatccattttttccaaatgtctttctcttctgtcaagttagtctcgtcactggttctattcaatgggtctcctcccaataatgcgcttctcctcaataactgtatcttgaggccatgatgtaagtatgctctttcatgcaattttctattggaaaacaacatttcataggactctaatatgaccaagctttgtatcatccatgcccttgtaggcagcccgaactcctctgatgaagatatgagccatctcaaaggcactgcaatacaatcagctagtttctgaggatgtgggatgatggacattgcggtggtgtcatttacgtccatcaaaccagcacccatcattatcatgcttaatagcaaaaatgggtgaacatcatcggcactaaatgagggcctatgtaatattggaaactgaacatggtaaactgcccaatagatatccaaacatatgcgtaactgctcagtatcaagtaaaaattcatgcaattgtggaatataaccacatatcttttgaatcaacaccgttcctctaaaagtctgagtactatactgtggaaatttaggtgatatacaaaaagcctcttctaacatgtggttagcattagtatgtccactcaaagtggtatcaaagggactcaagacgtttttttggttcaagaaatcattatcattgaagagccactgagtcaaatcgatgggtaatagagaatgttcggctgggatatgctcagttgggattggttggctcgtatattcgccaattgaacttgaacgactagaatatgataagttttcactttcactatgatgtttatgatcgacaattggatagaaccgatctgcaactgcaacatgtgcacttaagctattattgccttcgcctattgcatgatttgtgtgctgactttgccggtgttgttgtgttgttgcataacccaattgatcaatctttgaacggttttcttgtatctcctcgcttctgttgccattggtgactatctcatgatcgccattttcgaatacatcttctagtttgtcggtagattcaacaagactactattgactgtcaaatcagatgccgtatgcttcttcgccaactttagtttctgtttctgaatctttcttctatgatgtaattcatgcttttcctttacatcctttctgacaaacagcttatcacaaccaggacaggaacaggtgtggatctcacgaggttcatggttaaatttgtgtcgagataagtggtcggatctggagaatgacttcccacactctggtacgtcgcaaacgtacctctctccaactttcataatgaaccgctggtctgccaacttctcactatactaaaacttctcgttttacgaaacaaagctaaattctttttttttgttggaaaagtatctccttcttgctgaataatttattggcaattgctgccggtcaaaaccgatctcgcatcaaaagtgttcgaaatcaataccacttgtggtttgaaaaagacttttaaaatggtggtcagcacaagagacattcaggcgataatgccgaagcggtgattatgttccggaggctgaacgactatcttgaaaattgtgatccactttttgtgtgtatcttcatacagtcaaattgtattttatttgcttgaccccactttattaatccggtatttaagctttattgaccttctatctaatttcccttttgacataaaatgtaaaattccccacgaagtgcaacaagccccactttttgaaccaggcttcggaatgcataagggaaactccgatttttaagattttgcactgccgcatctgcgtcttcttcggagcaacttcttgaggttgagccgcgtggttaagtatttcaacacaggtgtagaaatcagtcgtattcttaatttaaacatttaggggatggtggcgaaatgtacagtttcctaaagatttttgctaaaaaattgcacaaaatatctaatatatgcattggttctcatttatgtatggtgattcaaatttatttcgattctggttgtaatttgcagaagtaaatgataatctaacaacattattgcatttaattctttcaattgatttacttctacggctcttacatgctaagccgcttatcagcccactgaatagagatatagtatgcactaattatagctcacgactaaaacctacaaaaagagctggtccatcataccgtgataatagtcgcacttatcatgattcgagattctatatacttatcataactctaaaccaaataccatataactgatatgtatgaatacatgtggaaataagaaccatgccacaacaagacgccattggcacaactcttgagttcggcacatgaaagctttgaccaagtcttggcattcttcttcctgtttgggctatctaattgaatttggagccgtataacaggggatgaactataaaatgatatctagataccttaagttcaattcctcgaagttacaaaagattcttgtcaaacagggaattctttatgaaaataataaataaacgacaatgtcttctacttttgccctaccattccatgaaggacctttcgatccatacattccaaatgttgatgaattagtctatgactgtggttacgcaaacattactattcctgttaatgacactaacctcaatagcgtcgcttatgattgtgggtatagtaaaggaggaacatgggtaggactagccccaagcccaaaggatagatcattcttcaactgtggctactacaatataaccatacataactcttcggctgagatctacagagtactctatgaatgtggatatttttttacaagcacagagcaagaacgaaacaagaaacacaaatccaattcgccccgactcgttcttccaaaactatggatactcgttttgttactagtgcaattagcttttattgcttgttaagagagagcaatatttttttgtcatacaatactttccttattagaatctattcactttcgtttttgtattattttcgatgattgtttaattatactcctatgtagcacaatatattttattccaagaagtatgcaacgaataattgattacacaagaaaggaactgtagatgtgaaaatctctttgacatatctatgtaagagttgctcctctcaaagagttgcacttcactcaatctttgatttgtaccagctgatagatttactcgtttcactcaatgacaaatgttcttcattaaccaattctgttgaaagactgaactctttgatgtaacagtagcatctgtagttggaaaccacaattgaagaagataagtgtagaactacattccgaagcagcaaatactacaagtacaatcgaatttttgtagattctagaattacgatagtatagaattgttcttgcttatcgtgacctaaccaagaaatcaatgagacacatacattctgaactagagatttggagttctgggcttttatataactcgatctactatcgtcgactttctcaattgaagactgctgagtttaagtgctaaaaatatatggttgcaaatggaacaattttgcataccatacatgagatgtatacgtcttggataattatcctgaacgcttgttacaaaagattgaaaggaaataaactacatttctttcattatgagagcttttcaaagcaatgaacagaattcttgatacacggacataccgaacaagattgcagcttcactgattcgtcttgataccatatccttttatagactttactctctcctaatccttcctttcaataaaaaccaatgctcgcaatcttgtttagcaggcattgcttagaaaatactgtaataaaataagagtagagtctattcaatgtaagatatgcagttatctaaataattctagcacctaatcttcaccgtagacgtcaattggatcccagttaggactgacgaatctcttgatacccttgactttgtgcaagttgttcaattcttcaccatcttcgtccgacaaatcgacaacattgaagttgctttcaattcttgaatcgctgacagactttggcaacacaacagttcctctccagatagcccaagagatcaaaattgtagctaccgaaacctgattcttttctgcaattttgacaatagtttcgtccttcaataatggggaattggaggagcccaatggactgaaagcttccaacaaaatatcatgtttcttacagaactcaagaagctcagtttgtggcaagtatgggtgtatctcaacctggttaaccgtaggaacgatcttatagtcaggcgaactaaacaactttttcaagtttttaatagagaagttagaaactccaattgacttggctttacctgattcaaccaaatgctgcatgtcggcgtatgtttgggtgaaatcgcggtcaaacactatatcacgctttccgttaggtaatgttggaatacctgggtgcagcttgtttgccttgttcaaacaaactggccaatgcatcaagtacaagtcaacatagtccaaaccaaggtttttcaaggattgatccaaggcaccagcaggatcaagagcatcaatgggggccaacttagttgttacaaagatttcttttcttgggattcctgaatctctaatagcacggccaacaggttcttcattgccgtaagcaagagcggaatcgatgtgtctgtaacctgttttgagagcaaacaaaacagctttgtagacgtcatcggccagggcttgccaggtaccaagtcccaatgctgggatggtttcaccactattgagcttgtaaacttttgatgatctatgaagattgttagtatataaggaactgatcaattcgttgaaaatgaagtcacatacttataagaagtagccattgtagtatgctaacttgaataaagattgaatttttgatgatttcatttgtaattcttctttctactcatggataatcggcgacttataagtgctaatcattatagcaggcaggccggttttgattttggtgggggagggggaggtggggatttacgcaacatctgtcggatgttgcaaagtgtaaattcctggcatacagtactacctaaatgaaaacacaaagcgcggcttctctagcataccccaccatgttcgaggacagaagctgacacttcaatttttattgcaaccgaggaattcagttaaggtatgcattatctttgaagcttaatgtaaaatctccaccaactagaagaaaataaaattcaggtacaaaactgggctcaaacaaagtgcttaacagcgctccagagagccattgctacacaatttggccaggatcattttgtttgcaatatgtattgagtattagctacgaaattgaggtgttcgaaataagaatcatttcattcataaacaacagaagaaaaactatggatctaacaaagactttgaatttccagaagccaaaaggctttgataaatcagaaaaaataaagaaaactagagtggactggcattttatgtttccgatgtcttagatttagtatcttcaatgtgctccacttcagccttcctctttgttggtgattctggttcaacaatagcttgttgagctttgaacatcaagtcagaaatatcttctccgaagatctttgcaacctcttccaatcccaatcctctagtttctgggaaggtgaattgaatcacgaccatatgcgtgaacaataaaatacagtaaacaatatagtatttccatccaatggaatccattccaagattgttcacgtagttgttgaaaaaaatccaaacttgacttgccaaggaatacaatatagaagcttttcctctcaaagtataagggacaatttccataacatatgtgtttccaattggagagaaagcatgataaaatcccatatcgaaatagaggagtgcaataattccccgacccaatgccttattcttgaattgtgttttttcgtttatgtctgccaacactatccaaataatgaatattatgcacattccaccaagagaaacttgcattacaactttccgtctccacttagcagaataaatagcaaaaacaagtgcacaaacaccaccaaaaagtgttaaaccaatattaatctttaacttgtcacttggctcggtaataccaatatcctgaagaacaattgagaaataataagcaataagcgaggaaccacacaattgaagaatcgatggcaatgcaagcgtgataaataatctatgcatatttgcttttgatgaaaaccatgtcaaccaagaaacctttttgccgatcttttctctggagattgcagcactaatttcagccatttcgaatttaactaattcactgtttctgtcaccaccagcatggtatttagtcaaaatttcaaaagcttcgtcttctttcccgtgtgcaattagccatctaggagattctggacagaaataaactaatactagttggattaatggaacaacagcttgaagcaacgaaggtaagcgccatgaccagttgttgtacttcatactagattgataaggaccccaagtaaaaagtgctgccatgaatgaacctactggaaaggcagcctgcaacatacttgtcaaaataggtctctgagatgggtaagctgtctctgccaacaatggagcagcagaaacttgcattccaccagaaccaaaaccaagaatcatacgtgcagcgagaaacataccaaaattaactgaagcagactgcaatgcagcaccaagaatagtcaatagaattgcacctgcaagtacatgttttcttttcattctgtcaccactagcagtcaaaaatggagtaacagccattgctccaatggtgataccattcgtcatagtactcaaaatttgaccatgtggtttattgaaatatgctgaccaacttggtaatgtttgcaaattacccatcatactaccatcataacctaaagtaacctgagcaagcagcgcacatcctaacaatacgttcaattttaacaaatgagggtactggaaccaccatttgtctaattttggggtgacgtcttccaaagtaagaactctttgttcttcttgcccaagtgagccattctcatagcctttagagctgactgttataatgttattttctttaatatcttttgttccaatcatgtttgttgaacactattcaaaactgatagacaaattggcgaagacaatcatatatataaagttttggataatagaaccagtcaaacaagaccccttcaaaattatttgagatatcttttcaaaaatgtggagtacatcaatagagattgtctacttgctatgttactgcgaataatgaagttggagttctgcggagagtaccgatagatttttctccaaacccccaccattttcgatgcggactaaaaaatagtacactgccgtaggtattcttgaaaaatacactcaaactaagagcgcatcattctgaggagagaatttcacagcacggaaagacctattcggtgttgatttacggatctagagatttcctcaagtgcattaaaattttggggttgaatcgacaacctaaaaaatttatttagatcggactgccaaatgcatattccttaagtattacagtcatgtatatagcgcaaggcacatttggtggggttgaggggaggtaatagaaaataccaatcttctgctaatcgagcttggcaaatgcatgcaaccaaggcaataccttccaaaagttaatgcaagggccatttggtggggggcatccgggcttttcaatattttcttctcatcaaaaaataacttcaacttctcgaaatgttttgtgggtgagagtgacatttgacacatttctaactttgtaatttcgtcctccttgcacttagattctccgtggggccataccacccggacgggagtgacaagtagtggggggtggggtaaatactataccgatgaatcatatatatagcagatcatggccatttgtcaacttgagtgtagtattatttgggatcaataaaataacaattaaagatgacagtcttgaagacgaaagtcaacctagccaatttcaacccatgctctggaaacccatttgaaacgagagatgatgttatgcgggctttttctgacacatttgaaccattgcttccagcattttcagaaggtggtacgggtgtaaacttggaagaaagtggtggacacttccccacaaaagcagcacacttcgaaggttttgctagagctttattgggagcggtgccatttgccgctggtggaggtgacttcaaatactgggatttattcagaaaagggttgacaaacggaaccgaccccaatcatgaagaatattggggagatatcgaagattgcgaccaaaagttggttgaattagctgctgttgggtatgccttgtcgtttgttcccgaacacgtttgggaaccgttgagcaaggaggctaagaagaatcttagtgactatcttcttaccgccagaagccgtcattttcgtcgttgcaattggaaattcttcagagtgatgattgacttgggattagataagatcggcattaagttcgaccatcaaatgacccaagattacttagatgaagttgacagtatgtacataggggacgggtggtatggagatggtgacagagcaagtgttgattactataacccctacgcattacatttatttggattaatctactacaaggcaagaaaggatactgaccctgaaagatgtaaaagattgaaagacagggccttgcaatttgctaaacaatatctccatttgtttgctgacgatggtgctgccattccatatggtagatctatgacttacagatacgccattgttgctttctggggagcattagcgtttgcaatagaagaagacgaggagccagtaattccatggggcgtcttgaagggagtttatttaagaaattttagatggtggtcaaagaaaccaatctctagattcagaaccaacatcctttcagttggctacgcttaccctaatcagttcatgtccgaatcctacaattctcctcagtcaccttactgggcattcaaagcttacattgctcttatgctcccagcaaaccatccattctggacagccaaagaagagccattaactttggaagacactcagttaaagattcctggtatgcttctttcgcatactaaattgaatactgttgcattaatcagtggcccatataagacttttaacttgagaaatcaagctgaaaaatacaacaagtttgcctatagtacaagatatggtttctgtgttgagaacaatgcacgaggcttcgacttcggcactcttgataacatgattggcttcagcttttcgggaaatgatttctatgtcagacaatacaacaagtcttggatttttgatggtggattgtattccgaatggacgcctgtaaccggaatcaatgttaaaacatggattctccagaagggtaattatcacatcagagtgcatcacattgaaaacaagactgattataaggtcgattcactcgagggaggctttgcggtaccttcaatgatcgcagaaggaattagtactgctgaagaaactgcacctgtcgtgggagaagtaacaactgatgatgacattagtttaattgccaatttattggacgatagaaaaccaagagttactgaacctgatccaaacacaaatttaatgtcttccaaggttatgttaccacaattgagaggttctattgatgctggctcatcagccaagtttgcctgtgcggtttatgctcaactgactacagttccttttgctaaagatgaatggttgcaaggcttaagtcttccaagtgaagacgaattaaaggaactctcttcaaaggcagaaagagtgatttgtaatgaataaataccgagaaatgaattttaacaattttagttaaatttatagatctaacagagaaagtgtgaactgagaataacgatgattaaacagaagttgtacaagttctagcctatgactcaagtaatttctataggccaggtttcttcaaacatcagaatcttatccttaataaaacctgcttttgcgatttgcaaaaacacggtagatactcttctggtcctttcgtgtttcttatgaaatccattgcacaatattatctttcactttttagtcatacatgcacgcatatgataaatcgttatttacttacaattgtgcatctatatacattggactgtgcaactttccgataggggtgcaaaaagcggatggtaatggccactccaagttcattctatggaatattttcagttacttcgagaatattttatgcgactttttggagagactccaaagttgaacagaggagacgcgttggcgcgtgccggaaatcaccagttccgacttttagcgaactgcaaccgtcagggcaaaaaataaacacgtaaagaaaaaataatttcttttcacgaacaaatgtccaccagggtccaagtccaattaatgacagcgcgaccacagttgaataggacaacaagctagagaatacaatttctagcgacaagtaggagaaggcagggttatatgaaggagcgttagcggtgaaaatgaacaatgggcatcttaagcttttagtacagttgtaaatctgtttttatagagttagccgacgagggtttgccattgcagtgtcttagaacgcaaacatctattgcacaataattattgatattattaacagcaaaccaatactaagaaatcgcaagtttcagtctgtgattgacgtcacagccggaaacgttttcgtgtagcgtgagagaaaagcgtacgtattggcacatggacttactgtaggctgctgccccatttatggattgtccgctggcatctagacattgggcggtgcagcgagtgtagacggaaaacaacaataccagcaatcataacacgggagaagacgagagataagacggagcagagaggaatgtaagcggcaaagaagagttgcaccgtcttagcacaatggctaattagagtgaattaatttagcattgtgaatgtagaatcactatagattaaagcaatttgtaatttggagagaatcgtcgcaatttaagtgtagcggtaagattgctgcgatggagacgattgtattgttgactgcgatatcgttgtattgtttgtttttaagagcgctggagacaatgacagactcagcatgccatatggaattgcagggtttctgtcagaaatagcagggcagatgcattatccacacgacatatgtagaataaacactaaatatagaacgagacgctacacgagaaagaaaagacaatacataaacagggatagagagcaagatgctggcaatagcattttacacctgagatacacctggatacgttttaaaagtgatttgtagccatgtccctagagtctgtagatctacagtcagttcgtcagttttgcaaaatttccagctccacttgagaagaaaaaaccccaaaaaatatcaccctggtgaaatttgctatttggatcatacaggagaaccctattctgaatatttaacttgattgaacaagcgtttgttgacaagggaagctaatgggcaaatgtttgggttttcacgagcccgtcgtcgtgttaacaccaccacgtatgtcaagacgacttttgccatcgtaaactttttgccagggctttctccactattttctttattccctactaaactctggcctcgccttgacagcctaatttcacctcgtaccatacacgtaatcgatccctatcattttttttcctgcagcgcatagaagtttaagattctgatttttgctttacatcaacaaaaaacaatactttccatctttctttacttactctccactgttgatagcgagactgttgtagcgttttattgttgtaatatctatttatttctacttcatccctcctcaattcgagtttcctccgagccgctggtttcacgtcttgttattttcctttagtttctgcaacctcagcatttttcaaccagccctcacacactgctagatttccattgtccatatgagaaaaatctggaccctgagaaaggacaagcgccgaagcttgtcatccacaggctcgccgctgctttacaacatctcgcagtttgacgctgacggcgattcgtcacattcacagacccagtcgcacgcccagtcgttgtcgatttctgacgattacgacgattactccacgctcaacggatcagaagtcggctcccctgttctccagcagaaccaacaccagccacaccacattctacatctcggccgtcacgatcataatactgggaaaaacaccgtatctggtaactcttccgtggccacttctcagactcacaccagaaacagatcatccatctcgtccatccatccgggccccaaaactgtacagcaattggttcgtcctgattatgattcgcgtgttattaagaatggatggcttaatggacttatgaacccgaattcggcacccgaaatctcggaccagacgctaaagttagtcagagcagagttgaaaggctcccatttgtacttatacaaacctccattatcgctcaacatcaagaacttcaagcttgacaactccggctcgacatcgaacgatccaaacgacgaatccttttacccaactccaactcctaccgaattacacggaaacgcttccaccccttcactttcagcccatgaaggattgtacaattcaaacagctccaacaattccaacattcacgaaattggctcacctgttcttttgtcatcttcgaactctcaaacaactccaacaattgtccagtcacagtctatgggttctgctttcacaacacccaatcccaacacgactctacttgacacacctcctttgaaccagccttcaacctccgttatcgatcccgacgacttcgtgatcacgtactacagcacgaaattgcctcatcccgacttaaacttcgattttaagaaccaccaattcatcacttccactgcttcgttctgccaatcttgtggagtcacaccttccaccacgcctaattctatagagtccttgatccacttcatcttgttcaacgaagacgaagtcgataatgcgcaaattttggatcttattaatattttgcccatattccccaactttggtagaatcttgaagttgatcgcaatcttcctttcagacatctacaatcacaagttcaaaggctactacaaccaggccgtcgtgatagagcgagtgctcaaaatcttatataatgttgaagagaacttcgacggcttcttgctaaagtctgacattgcaccctacatcttgagaatcttggagacgttgtcagagccggaatcgcccgaaaccgaaattacaaacatacagaagttcaagaaggacatgttgaacaaacaacaatcgttggtcaaccttgtcaacaacgaccatgttccctctgatgtgaacccatttcaagatttgaattccattgtgttcatgaaagatatcaacttggttgatttcgttcaagccattagtgccattgatttgaagttcttcaaacattggaattccaacatcgacaagtcgctcttgttgtattcgtccatcaatggcaatttcgactcatctagtagtcacggcaccgcggactacttctacaagaagaatcctctcattttcaacaatgaccatcatatccactacttatcgcgtctattgatcaaccatatatttgtggaaagctcgtcgtcgaccttaagttcttctagtttggaacgcaaagcaagattgttggagaaatggatcgacttgggttgtcttttagacaagtcaggaaacatgtcgtcgtggttgggtatttcatctatcatattatcacaaccagtacttcgtttgacaaaaatttggtcattggtttcgcctaactatataaagttgttgaagagtgattggtcaccagtgttgttcgaattggatagaagacacttggctaacggtacaagttacgagaagttgcatagctcaccatctgcctctccagacaaggacgacttgcgtgattctatcaatttcaaggactcgtaccatattatggctccaagagggttgggtaagatttatccgaaagagcgcgtcattccctactttggagatttagtcatcaacaacaactcaacagcagacatctttgagttggagtcgatttggaagagaatcaattattcattcagcagatggaacgagtacctctccaacttgaccaactattatgagattattaaatacaacgacgatgttctcagaagatacgatagcatgggtttcattttctccaatgaaagtttgaaccaggtcttatacttgggtgccaatgaagatggtaaaccattgcctagtcagaatgaagagataagaccccaattgaagagaaccaactctaccgacttgcaacaaaagttgttaaagttgattgaaattaattgtgactcgatcaatttggagaagataatgaggttatccattaatttagagccagatttgccagagtcatatttgaaggtggaaatgtcgacgtcagtgattccaaacactcccttggaattgagcttcatgagaaaccgtaatatgtctaatctttcgattcattcaaatggatcaaattcttcacttaatggagacctgtctacgatttacgagacagtaacaggcaagagcggaattgaatacaatcccgaatcacgtattccaagtttcaacgatcgttatttcaccattaacttgtccaagtatgatgaattgacagcatacagcaacaatgaagatagttcccataaccagaagcttttggatccgtctgttagcaagcacaatttcattatcaatgatgacttgactttcagaatcgatgatttcgttaatgaattagatcctacagctgttaatttcaatagcattgatgatgtcatcgttgaagtcgaagatgatgttcctggattgggaatcgatgtagatgatatcttgaattcagaaaagttcaacaacttcacaatatcaccaaaattgggttctggaaacaccaagaaatttggtggtattagcggtgattctctcaatggagcttccaatcattcgaaagacctccccatcagatttattccaaaatatgcaactatggataagctcattgacttgttgttgattgatgttaagtatttccatcaagaaattacccttgacttaacagaatatcgatttgtattcttgttgaattataactcattcattacaaccaaagaactcttggataagttggctttgagatttatcaattctggtaatgctgttatttcggttatgaaaagagaatacttgaagaggacaggagttcgttctccacgggttgacttccccaattggagtctagacaccactgttgatttgaatgaacttggtgacgttgattatgagctcttgttgaaaatacagatcaatattttaaaggttttgattgtcttagtcaataatttttactccaatttctcgcttgacatgggcaataagaaaatcttgataaagttgcttaaattattcagcaatgaaattttacaatggtataattctaacaagattgactcgaaattagaaaagtcgtttgaaagcttggtcaactattacaagaaattgaagaagttgttcgtgaagaagacctatagaccaattgaaattctgaaatttgacgagtacttgatcaaggaatttaagttcaacaactcattacatgaagttccaatgaatagaaacttaccaagccatagaaatgtgagcaaaatcgagaagttcttactcaaattcaacaagcttttgactgtcttctacaagggaatcaaggcagaggattgggtgagagtgtacaagattatcgaaacagttttcgaagaaaataatttgtttgaattcaacttgcagaaatcaaccgttagcgaagattacatgattgtttccaatgttttcaactacttcgaatctttggttgatccagtcgaaagacaattgatattgaagagatttcctttagttttcagaaagttattcaaattgtactttaagttcagatcttacattcttatccaactaactgatttaggaatcactgttgaagaaagattggatcgtatgaagacattgttgattatgtgtaagatctcgaagttgaaaatgagtgacaaccagtttgtttttgaaggaggcagaggtaacatcccatcttgtatcgagactgctattacaaatgtaatctactctcctgagagtagacttttcgccagtttgtggatcaaggcatcagttcagttaaatgatgatgtccccgcaagttcaacttcagtatatgaagatcttgacatgttattgccacacaagttgacttcttctgatttgcaaagcggtgagccattgttgccttgttttggttggattattgaaaatatcattgaaaccaataagtgcccaagtttcttcaagaacgcaatcaattttaataagagatacttaatcttcaagctcattaaggagcttggtgttgaagatattgatggaactggcgaaggagccaatttcagttctcatgattcacgagagtttgatttcttattgaagttggatgagtcacttgtggacacacaaagcatcagagaatttacacaccatgacaaagaaagaggcaaattatttaaaagtgtgttgaacgaacaacaacgtctattggtcgatgataatatgaagaagcaacttcgtgaaagcaagacaagctctggagccggaaatctggcagctgcaagcaactcattgacacttcagaaaaagacttctaattctagtctaaagcgtcaatcgttgtcttataaatctaattcatcatccaggttcaagatcagtggtctatttggaaaatcacgtcccttctcactcaatggatattctaatacggaaagacgtgttagttctcaagaattgccaaacattgaaagtatattagataccaagcaaaaaccatttgcaatcattgcattgaagagcaagaagattttcccagtttacttattgccattatgtttcaaggtggattcagatgtggcaggtgatgatgttttctttcaggctccaaatcaagctgatttgaacgattggttggtcaaattgaactatgccaacagacactggttcttctctagaaatcttaacttgaagaacaatcatccaatgacaacatttggtattcctattacagttgtctgtgctcgtgaacaaagcacttaccctacgttcttggagttgatctttgatgaaattgaaagcgaaggattgaaagatgtcggtatctatagaatcagtacttcgatcagtgaattggcaaatgttaaggctattattgatagaactggtactctcaatgtcaacgaaaagccgtatgatactcacacattgactagtattgtcaagtcatatttcagagagttgccagatgccttgttatcggacaaggtcattaattccttcttttccttgaacagactctcggaagagattgatgacgaagtggacgatccaagaactctagacaagtacaaggaagtcttgaaggagttgccatcggttaactacaacaccttgaagttacttttgaagcatttgcaaaaggttagtcatttcagtgaagataacaagatgacgacctctaatttagccactgttataggccctgctttgactgaagcaagcaatttagaaatcttgatcaacaactttggattcatgaattcgatcttggagaagttaatcatcaattacgactacgtgtttgatgatattgtcatcaccagtttcgtcgagcaggtgaagatgtctcctgttcaggagtctaactttgcttaacttcctcccatttctgtaatctagttatgaacgccttcacttctccagtacaattattaatatacttattgacgaacaatgtatagaatcttttagacaattggaatagtttatatgcttagcacaatacaagcttggatattacacgaatgagacaatgtcatttattgttattctaaatgcaatggtattttaattatacctaacgaagaaactgggtaacgagaagattttggtattagggtatagtacaaggaatcgtttaggcgatttcgaaggaagacttaccgaagtctggggttccacctaaagtaccgtagatgtcaccgacgtagttcttggaagagtacttttgacccttttcgtagaccttgtcccagttggtgatgatgtcgtggatcaaaggagtaccagcaagaaccaagttttcaagagaggcatcaataccaccttgattggaatcaaagaagaacttgtaagtgtcgttggacaaggatggaggaggtctggagaagtcagagatggttctcatgacgacgactctgtcgaagtcaactaaaccgtacttgtccaatctggtgaaggcttccaaggaagcattgtcttcttgagcagtggaacagtaagtggcactgccgttggacatcaacttggtgaggttggcaaagtaatcacctaaacggttaccagtgaagtagttgtcagaagtaagaacatcacacttgtaaacacttggcaaacccctagcagcagtttcgttatacaaggctctgaacttggcgttagcttcggtaccgttgttcaagtcaaccttcaaggccaattcaacagctctgtctctcaacttttcgttgacttcgaaaacttcggttccgtacacattgcctggataagtgtcttggttgtcggttccgtaaggaatgtaaccactgatccagtctgggttggtgttgttgtagtcaaggaagtccaattggtattccaaaccaacttgaacggcgtacttggcaaaagtgacaccaccgagagtggtgtattgaggctcaccacctgcgataccggcaatcaagaaataggtcttggtcaagtcgaacaatgggttcaaggtcaaggcagtgaccgaggcagcagcattaatttcaccttcaccagtggtgatttgacagatggtgtagttagtggtacagtggatagttgggtagagtggggacaaacctggaacggttatgttgtggatgaaatccaaggccttcaaccatgggtctctttccaattcgaacatggagatgacaaaggcttttggctggtacacagcgaatggcttaccatagctggtttggatgttgtcaccagtcttcttaccagtggaagctgggatagcttcttccaaagcggtgtcgttgatggcacgcttgtgttgcaatgggtgggccacagcagcagacaagacagaggccacagcaagaatagcagagaacttcatggttgcgaattattaagtgccaagactatgaaaaaatctgtcaaaccaggtggtagctgaaaaactcttggatatttctccagcttttatagtgggaaaaatccaaccatcttacgagacatcggcatcgaatggcggcatcaatgccgctaatccataacaaatgcaagaattgcctttttggaccattgttccacaaattagaggagcaatgagctttggctaattgttatctataacggtattttttgacttcgactcaatttaactaagaaggtacaaataccatctgcatgtcgtatataaaggcaccgatgaaaattgccccagttcgttgcgatttgggcccaatcgggtaaggtgaatgagtgcatactcatctggcggaaaatggctccagttccagaccgatttccactggagtttccttggaaagacgacccccacaaattatgaactcatatagaactactcctacaatcgttactattccttcccaggaataccaggaaagagacaagaaaagagcctatccccttgtcgggagtcagactttaaattagctgttccatcggagcacaaatgcaatatcgaaattctacagaagtcaatatacggacggtatctaaggaaacagaaaatgaaaattttggtgtattcgtccatctcagcaccgttttgtgtccaccactgcctactgaacaatgggcggatggaatcggttacgaatggggtgaaatggagcggcaagataagaatctgcaattagtggcctagtgtgccgtgccatataggcgtgccgcaaacattctctttcggttatctaccccctatttgttcatctaagctatttcgaaactatctttaccaaagtctggctttccacctacactcccgaagatgtcgcctacgtagttgtcagcctcgtaggtttctccactctcgtatacgttttcccagttggtgagaacatcgtgaataaatggaaaaccagcgttgaccaagtttgcaagagaatgaccaattccgcctttgtcggtatcggtgaaaaatttcactgtattattggccatagaaggcggcggcctggaaaagttggagatagttctcaatactacaattctctcgtagtcgactaagccgtatttctgcattcttgtgaaaacttctagcgaagcattgtcctcttgtgctgtagaacaataggtagcgctaccgttagtcataagcttcgtgaggtttgcaaagtagtcgtttaagacatttcctgtgaagtagttgtccgaggtcaagacatcacagcctaccactgtaggggggctaattgcgggttcaacttcgtagagagctctaaactcggcatttttttcagttccgttatccaattggacgttagaggctaactcaagtgctctatttctcaacttttcgttaagctcgaaaacttcagttccgtagacattgcctggataagtatacgggttatcggttccgtaaggaatgtagccgctaatccaatctggattcgtgtttatatactcacggtagtctatttgatattgcaacccgacctgaatggcgtatttcgcaaatgtagctgatcctgtagtaacctgagtaggttctccgccagaaatacccgccaacaaccaataggtcttggtgagatcaaacaagggactcaaagtcaaagcagtcaacgacgaagcggcattgatctcgccttctccagcagtagcctgacagatactgtagttagtagtacagtagatagtagagtatatgggcgacaagcccggaagcgaaatgttgtgaacaaagtccaacgcttctagccaaggatctctttccaactcaaacatagaaacgataaacacctttggctggaaaatagcatagggcttaccgtagctcagatggaggtcattgtcggtcgacagaggcaactcttttgtttctcctacggtgacttctctcttggagacgaaaactggttgcgctgcaactgcagaagttgcgataacgattgcaaaaaatttgaaaatcttcattttctgaccatctacagttctacaaaactacattgctccataagaagcggtttcgaccttcttatatagcttgacattccaggggagtcacattgtcccatgaggcaccaccaccattgtattgcaagtcccagagccttatgtctatagttaagtcttgaaatttgtgtcttggcatcttatctatagtggattgaagatatttcatgaaaaccggctctgcggctccttgttccaaaggaacctccgatggacaaaagagacatagagagggtcatagaagtatagcattttgtcagctatgatttttataaatgtcatggtgaaaatatgtttgctgtcgtacatttctatgctgctcgcctatcataatcataacggctgggagacacagaaactagaagtaggcttacagcgttaagcctacgtacttgcttacatcaagtgccgtacgattgcactatcaattgagggcgactcagtgtaggaatgacaatgaagtggatcaagattgcatctcccgaaggggacgagggttggccaaaaagagttcatacagattctacagtacgatacgaggcttgaaaatctcgtatccgaaacaaattgtttctagaataagaaagaactaaatggctgaatgctcttatcattttcttaccatctggtgcaattgctgaacctctgaggatctaaggctccaactgtaaaggtgctacaaaagagcagttcgtatacttagcgacggaagacaggaatgagattgtcctaatcataggaaaaaacagcggtacggatgcttcgtaaaatgcagtcctacaatttcaaactgcaaaacttctcattgcatgttgtaaccaacaaagctgcaaaaagtagacctacaggttaacagacgtgtttatagaagtagtatgaatcttctcaattctctcatctttcactctttgtagcgagtattctccagagaatggaagcagcagtgttaagcgagccacgcagtgccaagcgagtggccgacggtgccactgcgagctttgatccattggtatgttaatttttctagagattcacatagaaagattcacccagaagactatatttcatatctttcacaatttatcatctattccaaatccatatacaatatactaactttcattagggagacgtgtcagttgatgcgtatatgacacagcagcttgctgcaaaacgtcatcacatgatgacacagaatgggcctgattctgaagaggaaagctcagattcagatagtgaatctgaatcgtcatcttctgattctgacgacgatgaaatcacagatgcatccccggctaaagcaggcgttatcgagcgaatctcgctaaagaatttcatgtgtcacgattcgtttgaactcgagcttgggccccaaatcaactttatcattggaagaaatgggtcaggaaaaagtgccattttgaccggaatatctgtcggactaggagcaaaagcttccgacactaatcgtgggacgtccatcaagtcgtttattaaagacgggaaatcaacagcgagagtcacgatagtatttttgaatgagggccccgaagcatatagacccgaggaattcggcaagaggattattatagagaggaagctccagcgaattggaggaaatacctacgccatcagatcgcattctggtaggacgatttcgaccaagaaagccactctagacgaaatcttgtacaaattcagcatcactatagacaaccccttagcatttttgtcacaagataaggctcgtgaatttttgatgaacacttcagacgagcagaaatacagtcttttcatgtccggagcatttattacgaacattatagacaattttggcagaacactgaagaacatagctgaaatcaattccaaaattgtgcaagcacaacattatagaaaggcatgtaaagatagctacaacgagattgccagcatatacaaccgacacaagaagtctgattacttgagaaacaaacttcagatgctttatgggaaaatcctctggtataatgtgactacaatagagaaaaaggtaaattcatacgaggaacaagctatttctttaaaagaagaaatcaaatctgcagacgataagattgttgaatgcaacgaatttatagagaatgcaccagaagagatagctgtgttggagaaagaccttacagataaggagttatctctagatgacttactggagaagcattccaagaccaacgacaccaggcaagatgcaaagaatacaagtagccaattgttggaggagtgtaaggaaaatgcaaaagtgatccagtctttgcaagaaaagatagagacaagaaccaaagatatcgagaaagagcaacgaaagattgacgaaataaatgggggatcaagagaaaagctaagactagaatatgatgaattgagtgcagaaatacaaaatatcgaagagcaactaactgggataaaaagaactattgaaattacgaagtcttctgcaaaccctaatatggacagtcacaagtccacacttaaagatcgtatgtctcaactagaatctcttcaaaagagaaggcaagattcccaacgggcccagaaggacaggtattttgcatggggcagggaaatgagcaatgtaatacaaagaattcgaagtacgaatacctggcacaaactaccaattggaccattgggagccgatgtagaagtgaaatcagaatacagcaagtggagcgctttgataaacacagttcttaatagaatgctcgactcgttcatagtctgcgatgagcacgacagaagactattggaaagtatactagcgcattattcgatgaaaaaaaccattattgtcaggaagtttgaaagttttgacttttccaatggtaaggtgtctggacatcctacttttgtagatatgataacatgcaagaatgaagaagtattgcgagcattggttgatagtatgaatatcgagaaacttgtcatcagtgataaaaatgaaagcccatcgtcaattcttaacgaaagaaacgtaatgagtgttttcacactatcaactgtcaattctggtactcggtacggtaaagcaggagatactattcgaatggatcctgtttactattccaaggacattgtaaaattagctgttacaggagctgatgaacttcatgatgtagttagcttaatctcggaggaaaagcttcagatcgacatactacagaaaagacttcgagagatgcaatcccatcatcagaatgaaatcgttaatcttgaaaagaaaaagaatgaattcaacgaagttatcagaagaaagaagcggaaattggacgaaatagaatctaagattaatgaagaaggtgatctttccaacatcgagaaatacaaaagtgaaattgaagcacacaaagaccaaatcaaaactagggagggggttatagaggcgcttacggaagacttggagtcccgaaacgaaatcttgaagaaactaaaggaaagtgttaaagagcttaaagttcagttaaccgaagctacagcagctagagatagagcaaagaagaacttgcatgattatgaggttgaactttctacaaacaaagataatagagtgagttatttgtccgaaaagaaaaaaatcgagacccaattggaaaagacaaatgctaaaatagaagaaggaaacaacaaactccaacagttgattgatgaggcagagaagaaatgcagaagagaggaagtgacgatcacttccaatgacacgcaagattccattcgtgatgaatatgctctagtacaaacacaagtcaaagaagcagagaaacagattggcaaaccattcgaggagatccagaatgatttgatcgaagcaaaagaaaggcagagattagcagaggaaagtttaaaaaacttgtccaggacttataagagcttggattcggatttgaaaatcagatttaatttcgttcataccactatattgtcaagtgtcgaacaggcttccagaaccttcgaaaactgtatggctcttagagggtttaaaggctcacttagttttgaccatggagagagaaaattgactcttcttgcccaaacgaaaagcgacgacaaacaacgtgaagtgacctcgttgtccggaggtgagaaatcgtttgcccaaatctcgttgttgttgtcaatttggaaggttatggattccaagattcggggattagacgaattcgatgtctttatggattccgtgaacaggtccatcagtatcaaactcttgttgaacgaacttagacagtatccgaagtctcagaacatctttattacacctcaggatattgccgttgttggtgatttgaatagtagtgatgtaaagattcataagatgtctgatccgagaaaagacacttgaacgtaacattaacataataattatgtacagagaaactataatatatgtacaaaagaagaatatttagaagagaaatctggagattctttacagagtttcgtgaaagagcctccagaatcacccttcaaaattatgtgcggagtttgctttgacattaacttctcaagatgcaatcgtaaatcgtcagtagttgtgagaggagataccaacaatgcagaaagaaaatgagaatagacagcagaggaaatgctaccgaaatgtgtatcatgtgtcctgttgtactgattaattacttgattcaaaaatgctgtgagatcttctaatgtaatgagttgattcgacgatgatttggatacgacttgtgcaatcgatgtctcaaccgcattgaagataaggatgaaatcttcatccttaaggagaacatcaggatgaatgtgacggaagctggaaggaagctttacaagaatcagatgtgcctccttgggatatccaagttcacacaatgcttgaacaacaaatgaatgcaccatgaaatgacctgaagtcatcaagtgcattaagcttgcgaaattcttgttttcagattgcatagcatccacaacacttgatttaaccaactggtagaattgtggtaggtcagatatagacaatgaaccattcaacaaaggcaaatgggggatatttggccccgaatatacgtttctttcatacgaggggttataaatctgttcgttttcgtgtgtctctggaagtatctgatccgggttccaagactgttcctggtcaacatctggtttaggagcctgatttgtattattcatgatattgtttcttctccagacgtaattagtgtaagcggccaacttcagaaccccatgagcttgttcccagtctctggggttgtagtggcccctaaacaaaagagccaattctctgaaggctagcaatgcacaggaaagattttcagcttcactaaatgcttccacaacagccaccttgagatttctataagtgtttctgtgactggagtacgagtagaacctcttgaaatactgaagcaagcctttgactctagaagcatcgccactgtgaacaaataaagtagccatttgttcaagaaggtgtggagtaatgagaaattgaacattgtcattctctgaaacatgaccagattcagattctaagtagaggtcgatgttgtctatgagatgatggtatatggagatagcacccaaatagtcggcattttccactacttttgaagtataaagagaccatatctcgttgctcaaagtgaactgcgaatctctatcaaagagaacatgcaacaacgatgtcacggccggaatgttattggtttgcaagagattatatacaaagacctctacgagctccgttgcgaatctcacgggcgtcttgacaatataggagtatgtttcctggaacgaatcagaagcagtcaaatcgttcaagagcaattgcaaatgaatattcgaagcaagaatgcttccctcgtaattttgcaaaacagcatttcttctagcatctggaagtttagttacaagctctgtgagtgtggctacgacgtcgtaatcgtcggtagttctgtgtttcttgagatactcctggatcatattctcgtgaattcttgaatggttcgattgtgagatgtcaagagttctaggaatcgattgtatgaaccgacggcccaaggctcgtcgtatgggccgtgtgagcattgaataacttaagaataagaacaaaggaaggaagataaccaaatggaaagtataaagactatggcgtagagtatattctaattttctataaaaatgctttctattcttctgaagacaatcgcactataattcgcactacgcttttcactcaataatatactattttacataattctacactattctgactatattctttcaatttttcttttatttcaggatatttaccataacaggactctaactatataggtaatactacttcatatctactccattataccgctggccatagtcttgccatctccaccattctcaattttcccagccaagatctcaattcttctctacaggattgaaaattccataatctaaaatttttcaattgaacaccagcttctgactatccagaactcaagttccctcaccgtttccatgttgaagataggaatagcccgtgccgtgaggacgtcggcactcaccagagtccagccctcagttttgcgcggagccggacttctcacccaaaatgctcttttcaagcatcttcctacgagacagacacctaccatgatgggtggctctttcgtcagatacaattcgacttcggctgcaacttcagaaatcaaaaacacgttggtgtcgtttgacaatgcagacaatgttgctgatgtagcagaaaagactatcagtacaatgacctccgaccaattgggctacttgaactcgattggtatggctcaaggatggtaccctactgatatcgtcgaaagaatgttggaactcacccatgtatatactggtttaccatggtggggaactattgtagtagttaccattgctgtcagagtagccttgttcccattttacatgaaagcttcggccaacgtcgccagaacagccaaggtcaagccccagttggatcaggctctagccgacttgagagctgctgaaactcctcaggaacaatatgtagccatgcaagccagaaagaaagtcatgaaggataacaacatctccatgacagcccagatggctcctatattgcaattgcctctagcatatgggttcttccaggctttgagaaagatggccaattaccctgtagaaggcttttccacaggtggaatctactggttcgaagacttggctctggtggatccctatttggggttacagggcattgctgctgctgtcattatcgctgtggtcagattgggtggtgagactggaagccaccaaatggccaagcccatgaagaacatcttcactgtagttccacttatttccattttcatcacaaagaatttctctgctgctgtcgtattgtatttcgcagtcaactcggtagtgtcgttaattcagtcatcggtgttgagaaacaagtccttcagaaagtgggccaaaatgcctgaaaccccaaagccaggtgaaggcggaaaacaagccgaaagtatcagtgaatacttttccaacttcgttgaacagtccaaggaaacaaccagaaagaaggcaagggaaacaaacaagaagttggaagttacccagagaagaaaggctgcagccaaggacgggtttatcaaaagacattagaaacgtaatattagtttctttgtaaatagtaatttgtacatattcttgctactatcatgtataaacatttggctggtcttgacaatgtaaaagaggcgaaataacaactttgtcatagttaagataggtttgctttagaatggaatggctgcgaaaaaagccccatttacgacagctattccagaactagaacctaagtttagaacagttatcaaaattagaaggtgcatgaggtaaagaatgatcaattaatgagttttgtcggatagtcgtccttcagttgtatttcatttcatcgatatcgtgctcattggaatatggtctttatcaaattcaaaattgagagaaagactcagctcgaacgaaacgttctcaacatcaaagagcgtggttttgtctgtatcattcgtatcgtctttggttgccggtttagctcgggaatatgcttctgcatgttgggtagcttgtagaattgaaaaatcagatatgtcactatcgctgaaaattccagcaacattatgtattttgaacagtttgaagttggtcacatcttcatcttcgtcacatgaatacatggattttcttctatagtcatagcttgagctcagaaggtctggctgcttgtaataattatgaagaaagtcttccttttccgaattcgcagtagtagtcctatatcgactccattgttcatacttgtctggatcttcataaacgttaaaaattggattagaattgttggactgattgtctaagctttgaagtggaattcttttagtaggagggtcatcatgaaagagataataagcctcttcgtctatcttgttggcaaatatgtgttcattattttgatcggtgtagcattcagcacgagcgggatttgtatccagaaaacaatactctctatctctgtatgggttataagaataatcttgattcggcgccaagttctgtaaccaaaacgggttttcaatatcatggacaatattcttccaggaagtagatagcttctttctgattcttttagttccaattgattgaaaatttttcaacttaatattgtttgaattgtagtaatgatttgaagagctactagaaacaaccggggcaaggtccgatccttgtaaatcactgtccatagctctcatactttgggattatattattcctacggaaggtcttcaacatatgaaattacaagatggtgcaacaagcgttccgcaattgctttatttatagcggctcatttaagcattgaaaccgactgctactacacgaaccaaaattacaccaaagaaatcaaatagcggaattacagtaaacacaattaatcaacgtgtagtagtccttcagcaggatcagaaaacttgttgttcacaatactaccttcatcacaactcaacttattagggtcatcaacacaaaaatagttagggggaccactggataaatcgaagaagatagccccaaaggatttcaaacgaggatttccatgaaccactttagcccaggggccattggatactctacttttggaaaagatcacacttcttttctttgcaaacggaaagaaggcataagcaaaagatccaaatacttgaaccttctttcctggagctgcgttacaagtgatacttcctgtgttggaaagactaatcgacaaatcatcattaccagcactgacaccagctccggcagtgtatacatttacagatgtgtgaatgtctatactgacggtaatagccttagtccacttatagctttgagtataagaagctccactagaagaaagtttggaagaaacgcaccagctaacgggaatatcagttacgtgggctttcttcttgtccccaaattgaacttccaacatttcaacttccctggacttgggctttcgccaggggtttctcttttccaagtcgtctctgtattcagaaggtccaaagtagagtgtagcgccagtatcctctatgtaaatggctgtagtcattgcggttgccggatcctttcctttctggagtttcttccagaattcagacttgaacaagtcattttcagatgcgaaccttctagtgctaacagtggaaccatcgtcaaatttgtgaacacggtaagatgaatctttggtagttgtttcattaattccgaagtgagggagtggaccgtccagatctccgtcttcggaagcatcatttgagtaggttattagttctgagcttaccacacattcagtttcgaaagagacaagagagctcaggctgttgttggcaccacattgaagtggaagtgcagagacagtttctgagaggaacaaccagagagttaagaaaagcatctttcaagtatggctgagtctgaagaaaagataaatggagaaaaatctcagggcatgtttgcaaattttgtatacgatcaggattgtaccattaaatagagatgattttgcaatgctggagacgttacttattctcgcagttgcaaaaatgtattaagcttggctgcaatatttttaagcgtaagcaaaaaatgctgcatgccgaacttcaaaagtgctgcatgcataataagttgcaacactttaagagaatttcctctgtaagctgctagaagaagttatcatatgacaatttaagcatcgtaaacccgccactgctaggagccccatcggcgtttcgtgctcttccccaaatggtcaatctaacaaagaacaggaaaaagcgtgtccaaatttacaaccgtgtctccgtgttagccacaggctcaaaccaacaaattgcaatatgaaggtttaatgtcaaaatcacaatactaaacgtcaggcagaatctaaaataccccacagctatctcttattccagaaggctcaaaacagccgaagtaaacaaatcggcacaatccttgaagcactgagccggactcacctctccttccttgccctacaatttgaacgttgacatcgtattgggtggtatcggctggaaaatacctgacctggcacaagcctaccagccttcaggaattaactagtaggggccaaatgtggaaggaaattcctccttattcgtccggatgtcggctgtggagtcagaggcttcggcaatcttcgggttgcatatgctgaaaagttttcatttgtagaactgctgtggcacttcaggaagatggccagctagtctactctgcaaagatagtgtcataattctagaaattagcagagcataaaccgtagtggttattgtattcttgtagctagcagaagtagaattcgcatctcggtagctggtcgcatttttccgtgatagagccgattttatcggttgcaatttttttgccagaccactaatagcgcacttaatttaatttgaacaggaactgttattgccgttgctggggaagcaagaaacaaatgacgtctcgggatcaaagtagattatgctgctaattagtagagccgattagtccatcggtagtattaaaactagacgcgaagtgtgatttataatacaatagtaaatgtaaaatgtgaatgtgaatgtattaaatgctgaatatgccaattaaactatgtacaagcaatgtaacccaaccaagttatccgaactaaagactcatgaacatcattaaatattagtaaagtaatcaactgactacttgaacgattagtagaaatcctttagtatttccaatctcaattctcttctttccaattctttgtctacgttatattgttgaatgtggtcctgttcgtcttcctcttcgtcgtcgttgtagtagtagtagttgctgctgccgtctctaatgtaggtgtagtcaaaaaaggaatgcacttcctcttcgtcgtccagttgcatggaatcgatgctggcgtcttcatcgctgttgtaggctgtagtcaccatagacgttccggcaaagttcttaaagttggtgaggttgttcaacaagaattcgtcatctaatccagacaacatgctcgaagtctcgggtgtagctgtggcagtcgtatccatggcaagtgtagcggagccaaagtcggcgacgtcggaatttatttccgaagcgctatattcagcgtagagcgagccgttagaaactcttttgccatgagagccgttagaagatatggacgactcgcgtgacttggacgacttcaacgacaaagcggtgccgattttcgacaataccgagccggagctggaggttcttttcttgggttcagcctgcaaagggcaggcggtggacgaagctgtgcgcttcaacttgtggaagaagccgtgtttggggccgacggaattagacgacatagtcgacacggtagaaggagagtggctcacctcacagggcgagtcgaacgtgatggtgccgtctacggtgttgatgtagtagtactggctgagggtctggtcgtactgcaacttccatggagttgtgtaggaattgtgtctcgtcatggcggagcaagcgaaaatgtatacagatgggccgatatcgaatcgcggtctgtctatcagattatatcaagatgaaaccaggatgaaaatcacgaagaagctcaaaacgaaatgtctagtcgagataagacgaagatgaaattaaagatgaatctcgaaaactgagataactttgccgccatatatatataaatagccatttgccataaagaccgaatttgttgaggtttgagccactggcttacggaacactttcgttatagccggcatacttagagcttccgagcctgcgccagtatttccgccgctggtgtctgagttaaatccgctgattattaatttcctgcctgcattaggtaacggccgaattctggtgacgaaaaacttctcgcgcttacttaagcgctgtgcaggtcccggccgaaccaccagccctgacggcggtgacaaatgtcctgcacacaccactagtcagattttggtaatttgtgcacagaatttttctgtcagctcatcggtttctttttgctcatctctggagtccgcttacaataggaatgggtttcttctacgtgtttctaaaaccgattagtggtggttattgggaattattttctgggggtgcacagagatacaaaccgtaaccttaactttagttgcaattttggcatggctgacgagtttagtgtcccgcagcttgcgaataatatttcacctagacttctttactaaccggttagtttctctagaccttcacagccgttggcattttgactaatgtctcgattttaaacgattatataatcgggctttgctgaaaagggaataaacgttgcactccagctttttcttttgctcagccctacgctccgcccatctctcgtatcaacgaagccgtgccagagagccgtttctctcccgtagaccatcgtagcctgattgtcttatcctggttctcgcattgctccagattctgtgcaatcagctcagccgaattggatcactatcatctattgtcctgtacccttgtttcggtgattgtccagaatctggctgattaaatctaatctcactactagggacgaagcctactgactatctgttccccacatgacttgaattggcaattctgaatacaatgtattactcaccgtttcttctcttttccgaatctagatcatataaccaacggctctcgccttacgtcgccgcagctgatatgagatttaaatgttttcatatccagcgaacttactaggtcttcctggacacctgtgccttctcttcactcttttgtttggctagagcttggatctcgttcatcttctcctcttgaaaggcctggacaacgtcctttgtttcctgcttgtttttgaagtagtagtcacggtaccatttcaactgggcaagactctcaagaatatccgattttgccgtatggagcccggtctttttcggacagcacttcatgagctcaggattgtgtctacggccgaactccatgatcgtagaaacatccaccaaccggtaatgcaaatggtctgttacgcgaggcatgtctttcatcaagaatatcttgtccatgtggatcgaattgccggcaagaatgccaacacgcgattgtggaatgtactttacaatgtagctaagcaattcctgttgtactctttctagcgtttgttccggatgatccaagatcttggctactaaccccgacagattgtgttgactaacacaccactcgcccatggaatccaatcgctctttgctgtagtacactgtagactcgtagccttcttcatctacgacattgaggtctccgtcggtgataatgcaacacacctctataatgtgatcgtcaccaaaaacatctaaccccgtcatctcacagtcgatccacacgagcggattgtccactttcttcgtctttctaagcaacgcctgcatttggccaacttgttcgttgactttttgtcttttgttggctcttccatctaaatctggctcctgggaaggaggaatagacgattgggagatgttttcggattgcattctgaagacaattgaagggcagaaagaatgtgatactctggtgtgtctagcaatggataaaggcgactttctcaagtgtctgaacattgtctggagaaagagacgtcttgttgctctactgaaatgttgaaaaattctatatactggtgcactaattttttttcatttgcatcgtgagactaccagattgggagtccaatatggaaatcgtgaaaaagctggagaataccgttttctatacgagacgcttttcagaactttccgtacaattaaatataaaatgatctcgttagactccttctatttggcatactaccttcttcatatacccatcaccgtctttatcgactctacaattgtggtacctccagacagtcagctttcgatctcaaaactgattcttgaatttcatatagcccagaacagcgattttcttctcgttgaaaagccattgtggtttaccctctttggatgggtcgagttggtattccagttgccgttgtttgtatacttttcttataagatcgccagaaatcacactcacgatggtctctacttggttttatccgtggtgtatggcttcaatgccgctttcaccacgtttgtgtgtattggctacgctcttattcaaggtgagtcttacggcttgacctctagccaaactttgcaattggctgctatctacgttccgtacttgctcattccaggcttgatcttgattgactctggttcacgcttagtgggcttggtatcccaaaaggaaaagctggaatagatattcatatatgtgtttgttcgtaaaagcaaaaagagaaatagtaacctcatagagatagataaatagcactagcagttataattttgctgtggataagcagatggttataaaatagtatagattagctatagcttgtagcaaactatgatggctatagtagttacagttactggaaattcaaaataagcgaattgcgtaattacatcacttatagcaaaggactataggcattattactatagatcaatcaaacattcaatgccgaataacttcataatcaatattcgccattcaacacgaacaacacatctaactgtcgtacttttcaatcaaagaagtagccaattcaatgtagctctgctcggcttcttcttgagaggtaccttccaagtccttccaagcttgccacttgtacttgcccttgaggtcaaagatacctggcttgtcagtggtgttgtcgccaacggtggcttgcttgtacaaaccgtacaacttcaataattcgtcgtcattaggacgcttagataagttttggacggcgttggcctatatgctgcctgaacacgactgctcgtctgatttcaaattgagatccattgaatcaatgctagaaataagatcaataatttcaagttcatcaatgttatacgtttgtgaatcaattcttggaaattagattgtcaacaagttcaacaacttcagtatgaccaatgtcaactatccaatgtccacattatcaagattcattacaccaaaacgtcacaaaatgttgaaatcagaagaaacacttacgtgttaaataggcacttagttagtatgcgaaatgagatccgaattgctggagaaaaccagcccgagctgagccattggcagacaaaactttcaaaattgtatccgccaacgaacagcgctttgaatcagagcagacgtactttgtcagtgaattcctgagatggcattttcaatttgtggttacgatatagtacaaatctgagaataaaagtggcacatttctgtgctccaattcgcaatttggccagagaaatgttgggtgagaaagacagtttgtgacgtaatcagatagtcgcaacagttactggaagcttacataagtaaatgtcactctccagaaaaaaatgacatcaacctgctgaaggcaatttatgtgcatattcccatcacgtgaaaatctctaattctcatagggtgattatctgatggacagttctgctccatgtcgttttatttaataattcttaataatatagtttctattgttctaaattacgttttctatttctaaaagtttacacatcggctgatgccttcgatgaccttattatcagtaactgagtttcgcctgttcctaatgaagtatagccgtacttacaagttaacttgcaaaaaagaaacttccttcgttgatcatctctactatctcattagcatgtattaactctatctttatctgtaaatctagaaacaagcgtcttcagcaatcccgttaccctaagaatctcgaatttagggaatttgactaaggcgtcttccgtcatctctctaaattctatcaaattctcatttcggacttctgatctccaatctctcaactattctgtttgtctatctatttttctctatttttcactatcgctttcaatagcttcgtcgtttgagaatttctggatgcatttctggatgtgtacaagctcaactggtttctcgataacgtatgaaaacactttagaatcgttggcttcatcaggaaaaccagtcaccgcaatcacaggagtagaggagttaattccagttgtgtacttgatcaacttaatagcatctattgcttcaaccttaggtaatctcaaagccgtaaaaatgagatcaaacttaacttgacttgtggctctcctgatcaattcgtctccatctgtgattgaaacaacgatacaacccgctttctccaacaatttcgtcacactatgacgaacaacagaaataggttcacaatataatacatccacatctttcttcgcaatgagtgagtctccgttatcgaccgagttgcttggtaacctggaactttcacgtctctttcgtattctcaaaagagcagacgacttgttgtcttctgtatcagagctcgatgaagaaaattctctaagaacttgtttggggaagaccgaggctctagtggtatctatttcgtccccactggagtagttactgattcccgatcctaatcgttcatgcttcatcgaatgtggagatgccgaagtcggttcggtgtatttacttggtgaagaagagcgtcctccagcagcagctataggagaaactggccttttgaaaggactaccaccagaaccagtaaacgagaatcctcgtgatctacctgtaggtatagaatcagaagatgacgacgagaaactgtttctgtgttccaaatgctccttcttgaacctgttgataacatccttattctgcttttccaacacattcaaattacgatactggaaagaaccaaactcagtgagatctgccaatttgcttccccttctttctctggtgccgcttcctggcatgcttggaatagacaattggcccgtgacagatgaagctttgtcatcgtctgattcgtcttcatgagggaattgacttaaatgggcacctctagcatcaaagtactcagtagactctggatcatccaatactggcacaaaggctggcttctcttcgaagagggtatcccagttgattacagaaaagaatggatgctgcttgatttcatcggctccgtttactcccaatctcactgtaggatccaaagtcaagagcctcttaatcaaatccttcgcatcaggaggacagaatttgtagtcttcttcttcagacaaagttggccaatctatggctccttccaagatattcttgaacaccttgtccggactttcagcatggaacggagtatagccgtaaagaaactcaaacaatatacatcccaacgaccaccaatcagaagattcaccttgtcctaaaccctcaatagtttctggagccaagtagtctggggttcctacaaacttcttaagctctgtatccttttcgttcttgggatcgaacaaagcataagatgttatagaagtaccattgttcagagaggggctgacctgaaaatcatcgtctactattgcaaatgacgattcagacgaagtccgtgggagtatcgggttcaaaatgggagattcaattccgctcgagttggaaccagatcgaccagtaggcttgaatatagagcttcccctatgaggagcagcagtgggagtttgattcagagcaaagttttctaagaatgttaaagttggcgaattcaaggatcctacagaactctttccatgctcaacagttggcgaaagtgagaatggcgtaacagaactggttctcttgtgatgaaactccaataaaggcgaatctccaccgagtcccaatcctgatacgttagctagcgggctctggttgtgaggctgatctttgtgcagttgctgtgtgatgcttcttctgaagaactcaataccggtttcagaagaactgctcttacgatgcgatctatgttgtcttcctacaacacctattctggataagccaaaatcggtcaacttgagatgaccctcactatctatcaagatgttatctggcttcaagtcacggtggataattccgcgctggtgaagatcgttaacacccacaatgatttcagcaatgtagcgccgtgaccattcgacatcaactgtacccaaagtcttgatcaaagttccacaatcaccacctactaagtattccatcaccaagtacaagtagtccttggattgaaaagtactatacaattgagcaacgtaggctgaatcagactgtttcatcattactgcccgttcagatctgacattcaagacttgatttttggctatcatgtctcttttcttcaagcacttgatagctacgtagtcgcccgtaagtcttcgtttagccaaaaatacggaaccaaatgctcccttactaatgggtttgataatctcgtagtctcggatccctccaccggtagacttggattgcggagttgttgaaaccaagagtggagaaagaggaggtttggtaccggagcttatagatcctttagtgctagtagaaatttgaagagaaaagctgttaccgccagagtttgatctcttttcagtaatgctatcattggtattttcagcattcacagatggagaagacgatggcgtagtactatcaaacctaggatttggatttctttgataagatgacaaattctgtttttccacatatggagcaggcgagagatgtcttctaggagaggaaaacgacgagttattttctgatgatttcttcgacaagtctagattattaatcgattcaagaagctctcgtgaagtattagctccattggttggatttggaatggaaagggaggaggttgaagagtttatggaacttgtcgtcatcgtactacttctatgctccaatactggaggaggtctgtcgcgcaagagaatgtctttgggtgtgatagacttgaattgaccctccacaaaagcatcttgaaacaacctagcagacggacttgttgttctagccggttgtggcagatgtaacactcctgattccggactgagaagaataggctccgataatgtctggtcagcaacatctatgtctttgtcgctagatatggagttattaaattcctgtgggacagtctgttctttgattttgaaaacagcctggctcacagttttgagaaccgcttcgtctacctcctttttgatcttttcagaatactgtaggatggatatgagacgtgatagagtctccaccttttcacttattaatcgctgtgtgtcttctattatggagcgtatagccggatctgaagtctcaagatagttagcagacattacagaattcaatgctttctcacttgtaggtgagaactgcaactcctcgctctcgttactagtaggagggttgattagcaatgcttcatcacataactccaccaatctctgtagaatgccaaagggaaacttcttggtgtgtatcatgggatttctagcatggaaatttttattcaaaacttggttggcaagtctgggagaagactctccagtagaaacgctcggcaagagcattcccttgtattctaatatcaaactatgcgaactttcttctgaagatgaagaagcgctggacgaagtcgaatggttggatatgagcgaagtagatgaagaaagagcagaagatgtaggtgacactaatggttgcaactgctgttgggccaaactctcagaaattcgtattatcaattcacgctgatcgctaatggcatcatgacactgctgaagatcttcatctgcccgatgttcaactacgcataaatcagaatgcttttctatgaaccaggcggggatttgtctttcacagattctacagagaatggtcttgggttggggaacattgtcctcgtctataatgcctaactctttgagatttacaagatacccttcaaagatctctgaaccaaaacctagcaagttgatgagattttcgggtatcgtcaactctacgtctaaatgtgcaaatggctttatagtccacatagaatgagtgggcattctggtcttggcgtcgtggatgagaatcccctgagcctctagttctattacgtctccgttattcgagagcttcgagcttatagtactcgaagtatcatcatctacaatgctggcatcatctgcatctccatgttcttctttgggaacgtaatctgttgtaggtatgaggacatccttaacatcttccatcgagttgtgaggtgtgagatttgatcctccgtcgtcggcatgttggcttacagtggtgttggttgcagtgaggaactttactttgtagctacagtcatctacaatcatcttgtcgatggcgttgttgaacaccaggaggtcttccggactgtttccgatgataatcttggagattgggttatcaacgattttcttgattgtagttcctattatgaactcccagtttttactcaagtatcgcactttgccgtcgagatcgagctccataactatggtggggttgtttgaagaagcgagccgtaagtcgatctgttcttcgatggtatttacaaggctagggtagtcaccaatgggactgggaatcgtaagggcatcatcttttggcacctctagtaattgagattgtgatagcgttctgtgagtagtcgatagcgactctggcgatttcagaagtggcgatggctgtcgttcatttgaacgaagtatggaagagttgttgcttctggtgatttcgcacggagataccgaacgttcgatatcgcggagattgtgcatcagtagctggaagagcggctggtgaaaaagcccgttctcttcggaggcgtcgctatccatatcttccagcgactgcgacggctgtaccggggtcgatgttctgtttatatgttcagccattggcgcttacgacggtgatgattaatgtcaatgatttcaattagatacaataagatggtaattgaagtggtgatatggatgtagatcgcgataactataaagatatcaacgaagatgttgttgttgcagcgattgacaaagtagtacagatatttgtatgcttatttgagttgtatgagatcttggatcgaaatttgaatattcaatgagccgattcgtgagactaaggacacgatggctagattgtttaacgctttaagcacgctgacctgtaatacaggtgtaaggagtatgagtgataagaataaaagtcaaacgaaacaattctgcaatctgaggaaaacttcaatctcgatattgaagaaaatctgctctatttgaataaatatttattatgactagatattattagtgacactcgaacggggtagcgataagagcgcatggcccaatagtgagatctagcactggactgtagtggggtagcgagagctggtggaatgggctggcggcttctggcggaaattaggggagacaatagacagggctggcgcggccctagcgagaaatagagaagattgtttgggaaatccttccacagctttaaagggctggaagctcaagtccaacttcttgtccagtggattgtatctaagggtattttcttctaccttacattgctgtgcttgccattgcctattattgcgacgactgtggcaccatcttcttggaaatgtccacttttcagcattttgtactgaaatcttggacgtcatcgtggatttgagttttaccggtagaatatttatctcccagtgcggtctctaattcgtcggtacagcagtaatttatgctcctaggcttaggtaactattttctactcttttaacgggccactgactcattgtacgatgctccagagagtctgacacttcgcctccatcgttggcccacttgggcacctgactcagatgagccttgactacttgcgttgcattggagacgtaacctcctgtgcatgaatcaatcccttgatttctcaactgaagtctggctgtgattctcgtaagatgtcacagtttgaggttggaagtttccccagtttaccgtggttcgtcgttatgagccatattggtacgacggttcttcactatccacgcagcggactcttatactgtccaatctctgccattttcttctcctgagactatcagtgcagcacatgcttctctcactgaatctctcgtaaatatacttcaaatcacactatttctgtataaaaactgttgagatgacgatgacaagatggcaaggtgatacttgaagtagttaacacttccttggaggattatcgtcttattcgtcagttatcttattgactggtcttccttctctgatactttttctccgaccctgaactaaactctgaactgaacttcatattctaagatcactatgcttattcttccatgctcaacattggtgtacttacaatcgtttctacatctctcttggttcctaactagttgaatttttattccttatatatatacaatattggtgtaaaaaaaacaggattattatggtgctggactggttaatgttagtgaaacttcaatggtcctagtctgttggaaaaaggactaccgaagattcattcatacgcttcagttgtctttctcgagctgcttgaagaagtatgcttaatggtatatggttctgattcctgttgaaagaattgaaaaagaaaactggttgagtcgctagacactctcttttatgatttttatgtagatgagtccaggttggtgattaacagtaatagttttttgtgctgcagcaaatgctactggcaagaataaaaagagtataaggttgccgcccacaagtcaatgtagagcgactttatcaaaaaattcaaagagttggatcttgaattcgttacatgatcattaaatcgttaaggtcgttaaaagttggattttaatcgaatcctgtaagatcggtaagctcccaagaaagcaaatccatacacaatgaagtgctggctctgcttaggaactatcgactcactctaaaatggttgtcttttcagagtgtatcagctagtgaactggaacacaggcttggagtctaatatgcttctcttcttgatagactccaataagtctgtgttcttcttttcgttttgttctaatatcaagttcttaagacacttgttttccatctccaaggtcttcaacttcttctccaaggccaacaatctgtcttgcaattccttggacttttgttccatctcctgttccttcaacttcttcttgattctaaatctggcagaagcggcggtgtttctctttctcttgtcttccgaagcagcaccctgtgcaacaagcttttcctctgggaaagcaccattgccttcggatggcaaattcaagaacgacaaagcgatatcatcctccgtcttgacaacgactgatggttgctgttgctgttgctgttgctgttcttgaaattggaccttctgcttgattggaaccacattgtcggccgaaaggacatccaaatcaaaaaagtcagattgggaaaaaatgtccaactcgttctggagctgctgtgaattgtattcgctcaagttaggtgacaccaccgagtcgaagtcgaggttcaagttgtttaagtagtcggtagggtgtaagttcattttgtctgcgatgtgaagagtgaaaaatttcgcactttcagcgagttttatggaatagaatctgaatatcagctaagatatcaatgaaccgaatgtgatggaaaacgattcgtggttggagatccaagcgtttctaacaattcttcgtagatatagactagtatagaatgacaaataaaccaggaaaaaggagtggtaagattttatttaatatatacaacagaaactgaactctgtatatggctagaaaaattttctccgattaaggagtgagtcaaaactgaacttgactacattgtctgatcagcgctgacaaatatggctaattctggcagaagcatgccggacgccagcccaattaggtatcatcttcctggtaaccgcgcgaaatgtttcacagtaatccagtgtgttccgacactggaatgaaaatacacccgtgccgcagcgctacaggagtatgttgctgtagaagtcagcgaataaccgcacaagcgggtgtagtgaaagttgtttgtgtgcaatggagcgtttgataggacagctaccaccacaaagttcgtagctgcttggtccaccatttcggggccaagacggccacctgttttctggtgtagaagttttggagattgtgaaaaatgttgaattgcagattggcatgaaaactgcaatgttacgccacggaaattgcctgtttcggctgcagacaatgaatctgtccgccgacagaaatgggccagtagttaagtctttgtcatcactgattttgtgttgacaaggtttgcgattgagccactggctgtgcactttcagttaccagcttatagcatccgacacgagcggatttctccttctgtgctttccgcttccgcaccgccatgaaattgttttggccgatccagacacgacatctcttaaagaaactgcctgcatggccattgctttttgactcggcccatgttgcagaatttttacacggctgcaaaatgacttcacacttggctgtgaaaataattgctgggaaagctcagagtatacaaacaaggacgtgagcagacactaacacagttgtgtctggttctcaccttcggctctgttactcaaactactcgaagaataagggtcattatcagctttcaagaaacgttttctctacatacagtcactttggccggaatcaaaacgtgtatgcttctggaatcctaatcacctcgaaataaaaggttaggggtctctacacccctgaattatatggaacaagcatctaacaatgtggtgataagaaaaaggagaactgcaacctaggtttataaagttaaaagaacagtccgtcatagttaccacagaagagaaggcgaactacattgttaaatacacaaccgtttgcattcttgtatttagatcaagcttctatgaagtgacgagacatttgctgatttcattcacaaatagtagctcaacagtggtttccctgtggaattgttaggtagagtaggagtagacacgaggataatacaacttaagtactacaaaagacatgtgaattagacgaaagtagagaatccagggggcaagaccgggaagaatggggatcataatttcgaacagaggtcttttgagtgcaaaacttaatcgtgctgactcactgaaacaagaagaacgaggataccgataaagtgtctacacaaccaaatgagacaaacactatggatttcaaaaaggtaggtttcgaccgagatggtatataattcgaagttacgttttaatgtgtatggtattgtaggttactagtgattgcattgttgcatactactttatcttcaatgtttgttatacgtgcaatgtggtctacgatcagagactagccaatgcacttaattgacatgaaaatggccacagactactgcttgacaatcttgacaactggaaagtgaaagtcttcctgtgagtatcaataattttattcccttgctctttcctattggtgaagttcatttgaatgtaatttaaatgactctacacatggaggatgctcccgtgtcaaaggatttgggctctgccaaatctgttggaaacaaatattgttgcagaaaaagcggatacataaatcggcagcatgacgaggcagatgttgattgcaagcttctcgagtcctctacgataagaaatgaaaatttgcattcattttgtaatgaaaaacatttatatagattgaaaaattcaaaacataaccaaaccaggaaattgatagtatctgacagcagcccaattaacaaaatttccttccttattatctctactccaaatgtacaacaacattcgttcaaactcttcaatatagtggaacttcaatcttttctttatagatctgacccttgaaatgataaaatctcgatcagtttttgttatcgctacagaaccagctagtatcaacggaaacattaaactactttccaagtttgacttctctgggatcaatttgacagctcttaggatagtagaaagacacactttaactcttatgtcttgacggttgtaaccatctttgatttgatgcaatcttaaaaaagcagcccattgtaaagccatggcatattgagacatctggacatctgaaacatcattgaagttcattgtggttggtaattcccagtcttgtagtttcatctcgatatcatccgccattatttgaaattgtctctcttgatcttcgccgtcatgcctcgatttacgtaacgaggccaaagttgaaatattgcccaaaattttgaatatttcaccagcaataccaaatctgaagccaaacttgctgttcaaaatctctgtgacctcttcttgatcataaacatgagattctatttctatcttttcacttatagtcagttcgcttgtttgacaattgtcattttgggctgattgttcaatataaggtggatgacaagtactgaggcttgaaataagatctatatagcaaaaaagttgaaccaacattggtgcataaccacttcgagctgaagccatctttttaatacctcctctaaattttgtgatctcagatgctttttctaataaaacagaccaacctaaagacgatccattcaatatttccatgattccactcaacaagattgatagtaagatttcatcagaaaagtagtactctacttgagaagtgctcccaagcaatgtagcatgagaacttgaacgatacaagacagcgtctctaaagaattttatatcattacctgccctgtgagccgaagcaatggccaaaattggatctctgaccctcttatctttcaatgagatagggataatagtgctcatgaatgcattagaggtctcgtcagcaaatatggtgaatgatacgtcagtaacaaaatactttaacaaaaatctctcctttacagaaatgttgttttccattacaatgttattcaaaagactcaagcatatactattactgatttgattcatgttctcaaacaattggtgatatttgatggatgttgatttgtgtaattgaattggaccaggggtatcagatctagaaatggccatacgttttctagtaatattatcactactattgttgatactctcgttattaatattggcctcgctactctcaggattattcagattgttcgcgagaattagaccaaaatttcttaaatcctgatctataatggaactggtaatattatcgtcgccatcgtcgttatctcttctaaacaaatcagaaaatagtgcatcattactgctgcaagtactgttcataggtgaagattccgcccctgtatttgtttttttatccatgtttaataatgtaatgtcgttgttaagaaaggtatcagtcgacataaaagcagctggtgaaactggaatgttatgagtctcctttacacatctatccctaataggttctgaagatttctgttccgtggaacttgtttgcagcagaactgtagtctcggaacaatttccatcgttgggattgtcaaaatggggcgaagctgaactatcatcaactgagagactgcttattagtgatgtcgaactagaagcagattgtattgacaagctgatctcagccttcctttgcaacaatgggtctaatcttgaagatttagcctttggcttcctcttacgcacagtaggccccgaacattccaaattcagtttggtacaatagccacaattgggccaactttcatcacattttctctttctctttctacatgcttcacaggccgatttcgagtggcgtattccagttctcttctcaagtttgccatttctgcgatcactcagaggtatcaaagagttgcttctaggagaataagacagatctctatctcctctttgaggtctaccaatttttttcaatggcctatccaacacgcacttaatgctcattctggcacacctttcacatggcacacttcccgtacaaacttgctttatttcatgacatctatcgcaggctcttttcttcggctttggaagttcctggagtagttgtagctgtgaaagatgttccaaatgttgatcttgatcttgttcgactgatattatgcttgagatactttgtagattttcagtctcattctgtcttgttccttcagacatgggcacaagtattatagtctcgtgaaaacgagatagcacattaacctgtgcagcttgaattcaattatgaatcaaaaaaacctctattaacagtgaagtatggcgggcttcaaatatggcaattatttaccgtgctctacttgttaatttacttcgtaacatcaagtacttctttttagatcgaatctaatatcacattgaattgaaagggaacctttgtgttccttatctaaaattgaaccaagcaaataattttgcgtttcttatcagctcgtgattacataatgaactataaatgttaacttccgacggaagttttctgtggtacagggctttgaattttatgtttgaacaaagtatatcccaaaaacacatatccgaccagccatccactgaatgaatcgcaactcattacttgttttaaattggggtccttttatcttgttgcaaaaatacaatatattaatatcacccggaagtttttatctaaggatttcctccaccctcggtatggattagaggaagatttatatactctctagtaggtaggttggagtttagtcgtaatacatgctatttcgtaagaagtatcaatttcaaatacttaaggattggtagtgagaaattgtaggcgactaatagttctaaataattagtggaataggagaagagtttgaaaggatgtgcattttcaagcaattgccccgactggagttaaattaatctagaataagttaagaaagctataacagtctgcattgaagtcaaagacccatgttcttgacaatttgatcaatatcagccttgatattatacgaacaaacttcttcgattgtaagcctgttttcatctttcaaatcagcagctcccgaagaccaaccgattctttcattcaagttttctctagctctcaatgaagcggcttgaattttgttggctcttggttgtctaacagattgatacacttttaatccatcttgtggggaaaaattaaacattttgctgaaaatgtaaccaaaggcagctgcatcttcaaatgccatcactgcaccttgagattgatctggcatttgagggtgggcagcgtcacctaataagccgacttttcccttgacccaatatggatactgtttgtgaacatatagtctccattgtttgatatcaaacgcaatcttgaatagttccttcaaggcaccatctaactctggaaatgtggctaataattgctcaggagtagcttcattgttccaaccatcttcacgcaagtcattgatctcagccggatagaagcagtaacatgaaacaatttcaccatctgaacatggagacaaaacaatcttatttttgtcgttaccaccccaaaattcaatggcttcattctttgaaaaatcctttaatcccaacttatgaacgtcttctgtcctaaataagcatctgtaacagcatgaggttgaaatcccaaattctggtatgacaccaattttctctcttgttgtagatctgatgccatctgctgcaataatcaagtcagcatatgcttctttgccgttttcaaagaccatgtgcccactttcatggttgacatcaatgactttataatcaactaacaacttacatggtgtaccctcccccttttcttgtgttgcagtatccatcaaaacattatgaatgtctattctgtgaaagttatagtatggagttccaaaagccttctcatagtctcccaagctgtaaacaccctcgatttcgcccgtcttccaatcgtgcctgattaaatccttcaagatgattggtttggcggcatcaaagtcaattccccattccttcaaatgtttaccaccatttgatgcgcacgataatgaggcaccaacttcaccagcaaagtgatatctttcataaactgtaacagtatgaccatttcttctcatggcaatggctgcagcaagaccacctaatccagcacctaatactgcgacgtttaatggtttccattcctttgtcattatttccagttggtttacaaatgggtaaatattatggtgcaattaaagtcttaggttcaaccttcaaaaaagttgattagagactgaatccccaaatatgcgattacttgtggttccattttatatattcctgacttgcagcaatttcaccaattcgagaaaaacaccagataatcgatttgccagtagtgcattgatgaaatcaactggcttgtagagtcggataactcaaggattgataagaaagtggattagattcccgcaagcacaaaatcaactgtcgcaaatttaaaatggccgccgcaaaacttttgattagcctccagacgaaaagggattaaacggaaatttaagacactatcgcaaatgccgaactaagatatctaaagcgacctaaggtgtgtatactttccgattcaacttgactgcatgttgaaattttttggaacctcaattttcatcttcgataagcttttttgcatcttcaaatttatatttcgccagatctgaaaccaaagagaattaatattatgtacataaaagtatttagaaagggtaagtaaaaatcgagatggaaaatgagggcatagcggtcagaaaagtaagctaagaaacaaataaaacgatgtgatctgagaaagcactaacattcttatatagcatatacagaactaatattgtgtatgtaacgtctataaacccaaaactctttcaagaatctaatacttgtatctgaagtgtctgttttcaaaatccgtcaaattggaccatgcgagtttcaattcttcatcttcagtcaaaggtaattcatccttctgctcttcgtctctactcttgtttctgcgatagtagatgaaagctataacccatgttataattatactcaaggcttgagtaaccaacaagcagattttggcagggtaatagtctggggcatccttgtgttgataactctgaggaccaacaatattaccaatggcaaaaccaaacatgataaaaaggttcgcaccaatcttctttgtataaccagaaaagttggctccgacccaactatatatgatagccaaaggggcaacaatgaaattaataaggtagataccaaccaacaagccagcttgattggactttggcaaaaatgacatcaaagcaccaccaatgatagcaggaataagtaaaagagtattggcaatccagcgtggaaatcccttcataacgaaatatgtagacaccaatgttgagaaaatggatacaataccagatggcatattcaatagagcagcttcccttgatgtgaaaccaaacgaaataatgtctgtcgatgaaaaagttgagattgtacttgacgaaaatgaaaccgtgatagccaaaagacataataaccaaggttgaatatcacacaacaattcccaaaattgagacttgactaagcgtttattttgaataccaactttactttccgtcaacttcgtcaacaacacatacttttcctttggcgttaaaaatttgcaggataatggattgtctggcaaagtaaaatatgctgctaaaccggcggcgatattgagcataccaatgacaataaacattattctccatccacgaatggaagtattagaaaccaattggaataggtatgagatcaatccaccaaatatttgacccaaacccaaaccacaataccagataccacttctaaacgaaccttcatatgaagtgtaccacattgttgtaataagtaacaaacagggactgatggcagcttctgcacagccgagtaaaatacgtacagtcaacataccaccaaagtttgttggagcagcacaacatgcagaaaagacaccccaaagcaagacatttaaacccaaaaccttcgaaggagaaaatttttgcaaaaagaagccttgaacaggttcaaagaaaaagaatgcaacgaagaagaaagtagccaaatatgagaattggttgttgaccaaaccaatatcttgtgacatacccataacgttactataattcaaagcaactttgtctagaaactgcaagaagtagcatgtcaacataattcccataatacgataatcaacctttctggtaactgcctccgctgagacagcttcttctggattttcgtcatcaaaattcttcaaaaattcgtataccagtcgatcgtgtgtatcacaattgccgaagtctgttgtcgatcccacttgggtaacgctaatagcagccaacgagcttttttcaactgagctcatgattctttttagttacgtttcttacttattattagcgggacgtagagacggtgattgaaaatatataatttgctcgatatctgttagatgtaaaacgaatcgaggcagtagagaacgtagatgaacatcgaaaaagaaggaatttatatctatatctatatatatgatttggtaacagatgccgatatcagcaatatggttaaggaaaccaactttagatgatagtcgtaatctgcagaagatcgttatcggcacttcaaatttgcgccccacggagacttttcaggaagatgcgaaaattcagattgcggcatattttcgtttccggaactacagttgctagaacttcatatttcccatttggcaattgttggcttccaattatttgctgaaacgaccttaattccttgaacgtatggctgtacataaagatgaaattcaaatatattgggcatttgtctcatttttgagagcttaatatccctttttgttttctcttaaaagagtttgtattgcgatttttccaaaacttcattattcatctagattcattaaaatgactgctgagccaattatttaccctgggtcattgatactcgttactggttcaactggtttcattggagcacactgtgttaaacaattattgcaggaaggatataaagttagagccgctttaagatccaagtcaaaagctgatagattgatgcgaagcgttgaaagaaagtatcaattatccttatcgtttgcttttatcagtgatatcacagacttgaaatcaatgcaaaaagctgttgttggttgtgatggtattcttcatttggcttcaccatatacatatgcagttaccaactttgttgatgagttgttaacaccagcagttaagggaacaacgacagttatggaagctgctatcaacgaaccaaaagtcaaaagagttgtcattacttcgtcttttgctgcagttttcgatgcttcaaaaggtatgcaaccaggggtggtattgacagaaagagatttctctcccttattatgggatgatggagctaataccagtgacgttgcagttgcctatcgagcatccaaaattgtcgctgaaagagcagcttgggatttcatcgaagaaaaacatccaaactttgatattgctgttttatgtccacctatggtctatggcccgttgatgaatactttattgctagattcaattgcatctttgaattttagcaatcaaggcatttggaagatgtgtacttcaagttccttggatgaagttccacctacaaagggtcctgtttgggttgatgttagagatttagcaaacgcccatattaaagccctaattactcctggcgcttcaaatcaaagatttatggttagtgctggtgatttctgcaatcaagaaattgcagatatacttagagagaagttaccaaagaagttggctgataatattcctattggtgaaccaggtaggagaattaccggttctcactttactaccgattcaacgaaggccatcaaagttctaggtgttcattttggaagatttgaggacgctgttttagatttggctttgcaactttttgagtatactcaaacctaatataaacatattttatgcacttgaagtatttttaactaactgttgtttcttgtcggcgactattatctgtaatgcttgaactttactttttaaacttttcaatatcaactgtaaactctaaaaatatacaccgtccatttttatgaaaataatgtgaagtaattctatttcacgaagtgtttcgtttgcataacacatctggattacactttcgggttatacaagaggaaatgtgtatgaatacatatgtctatgtctgaagtaactgttgaatttaccatcctatagtaccatgagccaatgctaattctttagcagtcaagtcaataaaagagctagcttgccacaaagcagcatccatatgcataaagggatgaggtacaccctcaaatctcttgaacacaacctcattaccattagtaattaacttttgagcgtaggcttcaccttcatctctcattgggtcacaccctgctgtataaatgacagttttagacaaacctttccagttcggcgcggtcatgatactcttgaaccagcccatctttgcaacttgaaggtcgtactcaccctgatctttagataatgaggaccatttcaacgaatcgaaccatttcaatcttgcccaattcaatgttggagcaaattcacattcttgggttgagaagtatggagagtctgcagcagttgcgtatgattggatatcatcaacttgtggtgtaccggcacaaaccaatttcaacttgaggccaatgtctctgcataagtgatcaactgctaaacagatattacctccagcactaacgccaccgatagaaatactatctttgttgaatcctaacttttcggcattttgatggacatatttagtagcttcgaaacagtcagtcaaaccagtgggaaaagcgtattctgggatcaatctataatcaacatcaacaatggcaattcttgccttagcacagtaatgtttcaaaacatgcgattcagtatccaaatcccctaaaccccaaccaccaccgtggaaatcaatatggactggtaataattcatctttcttgctatcattcggtctatatatcctcaagattatttcagaaccatcttcagctttgaatgcaacatcttttatgtccttgatatctggtgcaggagcggtaccataagaatagatctttgagtagttcttcctcaagagtggaagatcgatcttaccatttggagtatgagcaacatgttcattgtataaatcaacaaatactggatccatcttaccgagcattgtcggatggattggattgacagcttcatggcccgtttcgagtactttcgacatttgtagttatgagaattgataactccttttaagatataaagtaaaatggataaacaagtattgctttcaattgtccttatatacaaaagttgtgatttccaatcttcattacatgtttggctttcatgaatagtagtatgtagtatcgattaaacgtcgctcatttttctaaccgttgcgtatctcttatctcaaaaagtggccgtcggaaatttgttttttcgcgatctaagattttcactttgacagaagcccgataaggaagcagtttgacggtctacattttgaaaaatgacaatctatcactattatttgaaaaaatgacaaattctgaggagataagaatggaaggcttcaacatcgtcctcttctaaagtaccaaaataacttataaatacctttttattcttcgttttgtccattcagtcttatcagatcagcagagagaaatatatatctatatactaaaatgacagcatgggaccaaggtaagatattaatttcaggagcaggagttgttggtttgttgctagcacaatcattaaagaaactaaacattccatacgaaatattcgatagagatgagtcaataagcgctagaggtcaaggttggggtatcacaattcattgggcattgaacgatatgttgagcatgctaccagaagatttaatcaaatctgtgtacgatgctcaagtttacgaaaatttccatgagaatgacaatggtaatttcatttatatcaatggctcaaacggtatcccagttgttaatatcccacctgctccaagattaagggtcagaagagaagagttaagagtaatcttgtcaactggtattgatgtcaattggggttgtcagaccattaacattgagactgatgacgatgcaactgatatcaacaagagagttacagtcacatgtaagaatggcaaagtatttcaaggtggaatattgatgggtatcgaaggttccaaatcggtcacaagatcaattacaaatcctaccaatcatgaattgcaatacttaccgattagatttattggtggtaccattgagttatcggaagatgaatataggaagatggcaacaactttcagtccattgttgtttcagggcacaattccacaaactgaatcgttcttttggtattccctcttagcaacaccaaaatacactaaaaacggaacttacaaatcacagatcatgatgtcatggaaaaataatccggatgaaccatttgatacaccagaagaaaaatatgccctgattaaaatccattcaaaaggattagaccctcgattacaatacatgattgattacttggacaagagcaccgggtctttcatggagttgcaattggccgattggccaatatgcgattggaacgatttcaataataagatcttattgatgggtgatgcatgccatgcgatgacgatgtataggggtgaagcttgcaatcatggcattgctgatgttaaactattcacaaacttgtgtgaaagcttgttgaatggtaaaatagattggaatgcggttgttgggaagtataaaacttcgataaaagatagatgttcagaagctgttcttctatcgagacaggcttgtatcgatgctcatgattggagcaagatttttgttggtagtcagtctccgttgctagcaattagaaagaagaatttatgactagtgtttattagatttttccattttttttttcagttctgatatacattagtgaaacttaaatgtttgtttcaattactacaatattcaaatgatatagtggcttctgaatagacagaacatcttgatcttctgaaattgagtacagttctttctagccaagatttgcactcctcttaacagagctcatttcaatgtaaattttatgggcactttgcaggtacagaagattaatgaagatgaacttctttataacacggtaatatacatatacatccaattgcacacaatcgaaactagataactatttccaagtcaatgtcaatgctcttgataagtttgtccatctctccaaactctctgtaagtggacttggcaatcttttcttcttgcttgctcttttcatccaacaactcttggtacttagctttggcatcatttatagccttttcattctcctggttgatcaaatcttgatagaagattctagtagtggtcttcaatcttgagaaagggtcaccaccatccgtcaccgttgctgtgtttctagattttatttcagccttcctgatgtttgtcagattcaatttacggtttctttcattgactttggacatgacgttggcagacagagaagggttgtgggtggtctgatttaacaacattgagtccaatttcttcaacttgtcgatgatttctctcgctttctgggggttggcctgctgctttgcgatctttagttcgtccatcaatctagcctttctcgtaactgcatcataacccgacaattcgtctctaccttgtaatttctgcttcctagaaatcatctcattgacatccttgtcactgagacctctattgaagaaagcttgcaattggtcatatttatcgttaacatcatccacgtagtcaattgtttctccagtcttttccaattcatgtaaatatctgtcaaactcctcatgagatatagacgaatcggagaagatgctgagtggaaaatctttggtttgcttcttgttctggctcactaccaaaaacaagtcacacataaaggtgttcaatttgtaagccttttctggcctggattcaacatcaattatctttaccattctgtacagaggctttcttgacctcttatctataccaaggttgactttggcataacaatcgacaataacttcgctgaagtcggagtaaaaacaatacttgctcaatttggatctaccaacactgatcttgttaatgttttccacttttgccaactctgttgatcttctgggcttggatctacttgctcctccccaagaaacgatatcttcatcataatcctcttcgtcatctctgagcaactcttcatcttcatcgtcttcgtcttcatcttcctcatagtcatcgtactttctagtttgtctctgagatttttgttctctctgttttctcaattcactcaacttgtctctcttcgagctcttgtttgtgctatccttggtacggttggaacttcttgaacccttagctggagcagccgtttttaacttcttctgctgcttcattctctgttgtaaatatttcttttcattgtatctttccatctcctgagttctctcgaataaaatctgttctctctggatttcgtccatcgactccaagtcttctcgatcttgctcattcttgtacttcccttcaagaggatatgggtttactaaatcatcttgttcgtcatcatcttcttcctcttcttcctcctcctcttcctcttcgtcctcttcatatgctgcttctacatcagaagtatcgactcgtcttttcttggacaaaacctcatcttcatcgtcttcctcgttaacatctacagacttggatcttttcgatggggccacagtttcgctgtcagattccgattgaaaatcatcatctcctccggccaaagccaacaaatcgtcttccaaatctgacatcactgcctgttgctgtttatatgatatagtcgacagttaatggacattatcaaattctcgtcgaatctcagttttaagcagtaatttgatcacgtgatcctttgtacacctgcaggatatatttttgtcatatgtattgaattagattccggtcctttttttgaataaattacaattgtttttattgcaaaaaagaatttgttgtatccaggggattgattcaatagtagattttattcaagtttaaataaaaaagaaaaactttagctgggccgacaagaatgtacaaaagcaaaggatttcagaaagaatttgcacccaatactggcttcatcaaatttgcttgagtgaatttcgttagaattgaaaattgcatcatagggttcaattggctgtaataaattttgtagaagtatgtgacagactacaacattttaaagctagataggtaagcgaaaatgtgtcctatagtgaaacaattctacaatgaaacatgcatttgattataaatttaacagaacaaattaacagtatatcacaaagatggcatgatactgatttagaagtccatttcaaaattcatattacgttttatattctatgatatcttctccggggaggcatatcgtggagctctggatctttcggataacaactggtgtgagttaggacgtaaaaaatagtaagttaatagactttggaagttagaattgaattggatctagtgatatttaccagtaattgtatcaaatgcaagccaattctaattatttcgtggatgaatgatagtttgtgactataatgtgcaggtacttttttaaacaacttattcatttattatcctgatattgttcggatgctaagaggtataaaagcaggagttctgtttgagaatgacaagaattcgttttaaaataccacactcaggttttcgaatttttgttctcattacatatttttttcgaaaaatcacaacgtatttatcaaatacataactacttggagtagagtaatttagaattattataaagaaaaagagacaaatacaacatgtttgcttatgggaagtttcctcttcttggaccgaaataaccatctggagcttctgcggtagcattcaatcttgactgttgacccaaaccaccttcgataccaccatatataacgttgttaccccaccatgaaatactcttgtcgtggtactcaacggcaaagaaaatgatgatagaagaaaaagccacaccagcagtcaatcctgcagttgtgagatagttgtatttataccaccatgcctggtacttgttcttaatgtaatacataaaggcaaaggaagcataaaatgaacctgtcaagtaggaaagattgtaaggagcataattcaacataccaccgattactactgtaggttcaaagtacttggtgtacttaattggagcgtactttttgaacgcgattgcaggaatagccaacaaaaatccaattaagaaacagtattgcaaaattgggtataatccgttgaagaccttcttgggtccgataacaccccaaagaatagaagcactgtaaaagactctagagtttggacaagtgaatctctgtgtgttgtatggctcacaatagtctttaatattgtcaataacgaaattaattataccaagttgaacgaacgaggcaataaagacaccaataatttgaactctgaacaaagctcttggaggaaccttggagtagtgagccatcttttggtcagtgatatagttttgtgcctgaccgtcaatgttgtaaccaaacgccttgataaagttcaaagcaagaccgttaccgggaagagcataaccaacaatcaattcaaccaagacattgagtccaaaactaaaaccagttctggagtaaactgcagttattggaattaaaaaaacaaagttgatacccaaggcaaagaaaataccccaaacaggagtttcagcagggtagatttcgacacaaataatagccaacacaagagaaatcactaaaactaccaagaatacccaatctgggacttccttataagctctcatcatagtggagtgtgggtcagtgtaaccttcatatgtagatctcttaaagtttctgaaactttggtaaagacttttgagtgctctccaagtttgtttatatctggtaccgatttcataaacaatagaaaaagggtagatagcaaagaaggcaccataaagaactaagtttcctgcggagtagaatggtggtccgtactcctgatactttttttcatcaagcaaacttttctcattgaggatctccgtaacagcatagtagtcaccagtatttgtgaatatggacgaagagttgattgggaggaagcctgtccatttgtaattggtccagtatacaccaacgattgcaaaaaaccctattaaagcaccgatataagtgttaagttgggtgtagaatggaaaaatcaatggtgcgttaaaactaatcatattccagtcgaaggtaggaattgggtttaatcccaaaccaaagttacttccagtgatggcagctaaattgaaattgtaaggcttaatccatgtcatccagttgaagacagacaaggcatagaaaaggtaatcaggaacccaaaaatagacaaaggatgccgcaaagagaatgaaaaagtatgtgtatcttggaatcttccaaccgttaataatctctttcttttctggcaccatcaaagctctgttcaaggcgagagtaggtaacactgttggccagatagcttcagttggatatacagcaaatcttctaaaaacaccagcgaacccaaatcccaagaagttattagacaaaattaataaggtttcataaccaaaattaacccatttgttatcgtagaacaccttcatcttttgaacatgaatgttgtatgaaacgtaactggcaccacctcctgcaacagaatagaagagtgttgctaacatctgctccttgtaattccaaggacctgggttgaggtcaatactgtatttccaaatcttgaacttgaactttggcaagatatattccaacaacataccactaggataaagcaacacttgaacaacagttgggtccaaataaataccaggttgcctttcagcaaagaactgattaattactgcaccaatggcagtccaaataattccaagaagatagaccctgaaagtttcgactggaatagtatgatcgtcataaggatcggtaaccgctcttacttgagggtaaggtgagtggtaagcaaccaaaacggcctccaatctaacttgcaagtcccaatcgaccacattgtgggtgaaatcttcgtatttaccaccttcagacacttcctgagaagaggactcaccatctctgtcattcttctcatcaaaagtagaagccaacttttcctttgtaccagaagtcttagaatttccaatttcaacaaggttagtccacaattctatgtcttcgactgggatattggcgtcgtcatgatgctcaacaagagcttctttcacgattgtcaatgcttcatcttctcccattttctcaatcttgtcgatataaaaggcagcctgaggaggtaattgttcaaaggactctagaccgttgagatgaagtctcttcaagatgaaatgcttctgctcatctgtaagcgaaacaccaatctcaccaatagagactgggttagaagtaattgctctcaagtcgacttcatgatcctctaactgcaagtgagaagtaacacttcgaatgctaacgatattattaagttcttccttcttttcgacctgcgacatattgagaagtagatgatctcgttcccaacaactattactttgctttgaagaaagttcaactagttatatagatagatcatcaaaaggactagcaatagacttccaacttgaaatagagccgtaccatcaatgcaaattagcacataatttctgggaccgccgataagagccacaagattattcacattcctcttagttatcatctttcacctattcaggaggtgcttgtgaccgtgtggctcgggaaaataattgacgtacttagctgcagccggcgccaataaatccggcaaacagtcaacttaggtatccgttaccgtagcagtctgttgtgtagcctttacgatatcttgcttggtaaagctggcttatctccaaattgtaaccaatttgatataagcctattcagataaagtgtctgctcaacgataattttaaccaaccacaatcagctcgatttcatgtctgaggatatcgctagtaggttccatacatttagtaatattttttagccttttgatagcaattattctgccgaaaccatggtatcctacggcacgaattccaggatgcgacgtctatttattttaccctgacaacaattcaaatgttcagaataacggtgtctattactccagaccgagagccacaatcgaagattgatctaccctgcctagacttgtgctgtcaaaccaaaattgtcttttcttgtcgctcaagagttaccgctctcatggttttgtggtagaaaccctcgggtagtgatatcctaagcctagcaaaaataacgtcaaccttatcgggaaattaaaaaataacacatgatacattcatggtacggctccaccattatggctgtcccaagaagtcaggcaacaatgcaagtatcgcgtaaatgatccacagtgacttctaagccagtaatgaatcccttcctggtatttggttgtcgttccagccgccatatacgtggcggctgttgtatatggcctctgtttcacagtggtgatatttcattttgattttgaaccacgacaacgataaaacgattccaggtttcttggttttgggtaaggtggtgtcgaggatctggatgcaagatttccgggtggatttagtagtatgaaggatctttgattcttgcatccaagatccttatccaagattctgacactaaggtgaaattaatgtatgcgagaaacattcttggcaatttgttttgccgaatcctacaactgggtaaaggtagtagctacgcttcgtcgagtcggaggctgaactcactttggctcgctccagtttgtttgtctgaattggaatttgcatgtgtctgaaagtggtaacctcgctaattgatccctgttttgtcctaattcttattcttgggtttcagcgataacatcacgaataagggagcatagtatattcaagtacctcgtagggaatacttgcacaggaaaagccttgctagattcagcaccacgtagaacacttaataattggtggaagttgtgactattgggaactccctgaagtctctctgccaatccttcagcaaaaggtgccacagtggagggcgtccctgaaccattaatgtacactaaaatcaaatagaggagcgctttctaacagaactagtgaatttcgtattttgtacttttcagattgagcttccccggtgaaaaaaagaaacagggagcttgatcaattgcagtatgatcgtcgcttagacttgcgattagtcacataatactccttctccttacaatacaagttgtcttctctttgcaatactctagttacacagaacaagttggaatgtatcaactttggcactcctacaaagtttactcacacgaacggcatcctcaccttccagtagtttgtacgttcttattcaaatttcaaaaaattacgtaatttcgaaaatgcaacttcttctaaaaagcttcttatcacgtttttctgctgatactttccttcttgcatactctccatctacttgacttcgctgcctgttgcagttatactacacgctattgttagtagaccagctacctgaaattcagttttgaccaggatagggacgggctttatgcaggagcatccagtagtatatagataaaggacattgaagaagaaaatcttttacttagtaggctgaataggtagaaaatagaactcaaagaaggctggccatcgcaggtatatcatatgtatcttctctttgaatcacgagtgagaatagatttatgccaaagaaagaaattgctatatactctagaaagatgtgactgtatataatcttttcactgtcatgtggctcatcatgtgatccataaaaagatatctacgaacgcttagatggtccagaagttagattcataataagcggcataattgcagttgcatgactgtatttataaagcctttcaacttgcctaccagacaagagcaacacaggtgttcaaaatttgcagtgatttcttttcttgtttctccttttctgaggagaccgacatcagtgccttacgcgacattttctcctccgcgacattctcatttccactattatcatcatggattattcatttctggatctaaactccacatctgtttccttctaaaaacacactttttctcccttatctcgaagtatatagacatcgtaactttagtgctgtgagatgtcgtctatgaagcggttcttgaaccggaacagaaagtcggaaacttctgacagagagtcgctaacttctcggaacttggctcctacaacaagcaacagcaccacggagtctcacgatgagagcgtcaacgctttgcagccgatgtttgactcgctgcataacgatgtaggcgaagcagttcctctgtcttttcacttcaataacgacatgagtctcaacttgaatccctccatcctgaacactaattcgaaacaggccacatcagttttcaccaaagactctgagtatatggacaaatcactcttttcgcgtggtcagagtcgaaagacatattctactaagcagtcgtcgtacaaaagtggaacaagcaacagcagcggcaagaaggaagccttccattatagtcagcccttgcaaattttgaacatccctgaagaagcaaacgaagtcaatagaacaccctatgaaaccatcgctgacaagctttgcactctttacgatgacttggcctatataatgaaccagtacaataactcgttgatcaacttgacaacggcggtgatcaactcgatagactgttttaaacggtttgtttcctttatcgatactatcaataacccatccagtttggactggaacttcaccacgttcaacaacctgaacgtcagacgtatcatgaagatatacctcaacttctacgacaacttgttgcgcgacgaagtgtacatcaaattgaagttgttattggtcaaaaacttcaacgatttcacgcagacgttgaactctcgtagcctgtccgtggctccggccaccatcacgaagcctcagaacttcgctgtgggaaacaataagggtttgtcgttgcctaacgaagatgtcttagaacggatcatcgagaagatctcgtcaacagctatttccatgaaggaacaaaatggatcattcatagctccaatcactcgtggtttgagcaaagacttgaacatcctctgtttgtactttggctatccagatcccaccgattaccactacaagttgacgcagactttgcacgagttgtacgacgatatccacgtagtagtaataaagaaccagatcgaattagccagtagtggtgccaaagcggaagcatcacccatcaccaagttgactagtttcgaatcgtaccacaaccccaataatgttggctcttcagctggtactcgtgctccgattatggaacctacagcaccgatttctgccaaccaaaagttcaagcttcccttccgtattcccaccgatgctcagagaccacccatgtctctctcgttgtctgtagaaaactctagccgtacttctggaaccgtaggaggttatatttaccctatcattgatataaagaaacagcctcatttggagtcgtatgccagctccaagttcgctatcacctgtggccatgtctgtcttgacaccaccaacaccgcaacaactgagtatcctcatgtttcggctccgctgtcggtattgatatcattgtacaaacaggcagttgcccagcaatatcagaaagtagcctgtcatgctgatgaagccatgtttgctgattcaaagattgcttacggtgctgtcttgaaacagttagaagaaatcttccctctcaagcgtgtcaaggtgacagatccaaagaccaagcaggagaagtacgaagttagaaacttgcccaagaatagatttggccaaatcatctggggtgaaagaacgttgatcaatgctaagaaggacactgaggataaggaggaaagtgcgaatgcaaatgcgaatgctgaaaagagactctctgatttggccatcataaaagtgaataagaatcttgtttgcgaccagaacttcttaggtgatgatatccaattcaacgagttcgacccagccttgatgttcgacaacttgtatgtcagaaaggtgattaacttgacaagatattctcccaagcagcttgacttgaacatcgacgaagttgacctgagtctttcgtcgaacactgctgaggtcgcaaagaactactctggcttgctggtattcaagtatgggtctactactaaattcaccaaaggtactttgaatggtatcaagctagtctactggttagacggagctattcattcctccgagtttatagtcaattctcttgaaaataattcggcattcgctgctggcggtgatagtgggtcgtggatcttgaccaagttggaagacatcgaagacgatagctactccaaggggttgggtgttcttgggatgttgcactcgtatgatggtgagttcaagcagtttggcttgttcacgcccatctgcgaaatcttgcaacgtttggaagaagtcaccagcatcaggtggggcgtcgtaggttgttctccagcagccaaggatgttgttgatgaagacgaagatgacgaaggcagctctaccaacgatgagggagacttcgacagcgacaatgaaagtcacgaagatcttgaaggagcggatcctccagacatcgactagttcattttcgatatttcaattttcaaatgttgtttttgcccaaaatttattttacattaaaccaaagtgagagatagatacaaccaggaaagagtatggtatgatacaaagttttcttaaaaatttttgtggtatgataaagacgtttctttctaacttcatatgatacctttttttcatttcaaaacagttttttacgtgagagttttcaactataatcgatgggatatagtttaggtgtatactactatgattaaatatagttcataaaatattaagatcattcaaatacgtttaagagtcttctctataagattgggatactttgttcttatattcatttttgtattctcatacaagtacatgatagagtcactggttcaagtattcatttataagtcctgcacattttcgtcgagtatatccagtgaagaatgcctggggttactttgctaccgttgctagctctactctttggttttagtttggtagatacaatgtctggcaaaggaggaaagattcttactattgtttttgtttccgtcttgagctggtactcggggttgaagttctggaagcctatagtgatgtaagtgaatgacaaaaaagagcatcacgatgaaacagaatactaacgttcacagagaaaaattacaagaagaaggaaagttgcgtacagatatagatatcaactacgatggagatgatacgccagcgtcgtgggacgatttgaaaaccaaaatcaagattgccatgcatcctgaacttaaggacaaatttgaagctgaagcttcagggaattccaagttacagcaggagctcaaggagttgtcttcagagcagaagaaatgacgaaaagggataaagcatagtatcgttggtcgattattacagaatggcagagacgtagaaagtgtagagaaactgaccctattagatttgggtccgatcttgaagagtactattagatcgataacgagagactgaaaagttatgaatgaaaaaaaatttgagtcactgaaaacacacagccatatccaatagaaatgatcctttttgtttatacttatgactggacccagttaaagaaatatccacacctacatttggatatctgttcatatgatctacatagttcatgtacatagtttaggaattaccgttccccatagttaagctccaggcgcactggatgtagaatataaatttttttggtgatgaggtctgaaaaattcacaaatctacagtctcgaatctaattccatctaatagcaataccgattactctatagtattgtcatcattaacagtcgcggcatgggaaaactcaagaaaggaagaagaaaccagaaagccagactcaatcccattggaaccaaccccaaggcatccagcaaggatgagaaaagagacgagaatacgagacagtccaagatcttgcccttgatcaacaagttgaagtctacagtagcaaatgatagatctatggctttgggtgctattactgttttggctgaagacgataggatgagatcgttgttattgaaagaaaagctagttagtattgtcatggaacagtgtttgaacgatgccaacgacgagatcatagtagaatcattcggcttgttgagaaatttgggaattgaggagggctatgacgtgttgaaatactactggagatccaatatttggactgctattgaagctgccatagctaaaattcaaacttcatacaagtatttggtagaaaatggtgccaatccagcaggtaataaaaacgacaagtccaaagttcaattgttgtacgatttcacggagaatattttgtcgcttatcatcgtattggccagtggttcagatgatttgtacgaatccattttcgacaagatcgatccaatcttgaaatttgtctctgacttgctaacttcagaaattagcacgacttctggattcaagatttccactaaacttttcaactccttattagaattcatctatgaattctccactgagtcagaagattttatcaggaagttcagtttggacatcaacttcgattttgccaaattgtttgcatacgtagaagccaaagagtcccattacaacaacctcactagagtatatatcgaaggtatcaagttcaacaatttcgaagtattgagccaaggagaaaacaagtacgaggtcggcacccaattcttgtccaacatcttcgaaatcatcgtaacaactgatttagaacttctcaagaaaaacatacatgccattaaaaacccagacaattctagcaagcctattcagaaggatgccaacactttggaaacggacttgtcgaagggttacgacttagcattacaaacaaaattagaattgaccacattagaagtggccctagacttgattacttctttgttggagtacttgtctaccaacgataacgatgaacctctcaatttgcctacaccaacagttgaggtcttattaaacaagatctatccaagtttagtcgaattgaacaactttgaaaacgccaataaaggtatgttatcattgcgtgaaaagatcttggtagcattgaacaatttgacgtggctcatgttgtctaacgaatcgcttccagttgcttggttcgaaaagtcacttgcattatgggatttgatcataagttcagcaaatacttctgacgttgttttacagaaaaactgcctcaacgtattatggggtatcactaagtcgctcgggccagaagttagaagcaaattgcagccttctatcgttgacgaattgattgcaaaatgccaaactattatggaaaagcaaaatgaagccgacgaaactgatatagagttgtacctttctattgttggtttccttggtaacttggctccagtcgtaggcaacactcaaatcacgtctaaaatttcccagttcttgattactaccatcgaattattatgcaactctacagttactactgtcaccagcccggccaagatagaagttgtattggaggccataaacgtcatttacgagattttcggtgatatcgaatttgactacgactacgagatctttgtgcaacaaggctacttgcaaaaattgtcccttttggaaccaaaggtcaaggaattgtacaagaagatcgataaaaataagtatccacatctcaaagctaaaggtgaagagacgtggattaatttgggcagatttatccagtataaacagagtgaaagagcgtagaacaattagaaagataaatagttttgatgaatagaagaggcttctaattgagccgctgaaatgccttttgcagatgtgcaacaaaaactgtctcgtgaaagactccttttgtgcaaaaacttacttttaattccgatgtcgtatagagtcggctctgaatgaaccctgaaattgtaaatgctattaatagaagttactccagtttcaagtatttgttttagtacgtagtttgggaagccacagggtttgtgatatctcactgcatcctcttgtccacaattggctatttatttacttcgtttagtgcgcaaggtgactggaaaatatatgcattacaattacctaaattactggataagcttccgaattcaacatgccacacatttcagggaggtgtaatcgaaaaaaaatgtggaacgaggtttcattaccctgggggtcacttgaggggagatggagtagaaagttggttgttcccgtcgtatttcatttcttctgctactgagcatttgtctttgggcctggttcaactttctgccgctactgttgggctggccaattggttactctacccatattgacaaataactggaaagaggcaagaaaaggggacaaaattttagtcagttttgacgttgctgttcaatgacatcattgagatggattgccacacgtttgctgaattccgttcgaggtaccgagcgtttggtgcaggttagacagattactagtaaataagtaagcaaacaataattcccaattcagtaagaatgttactctgtttttcatcgaattttagacgtcacaaaattcttccttgtttacaacaagaatctccctgtgatagcaattattgtgatggagtacagacggtcgtggttgaagctacaccagcaaagaggacctgtgcgtccgtttctctccaattcgttcaagaattccacccaacctttggcacgatttttcacctgacgctgaagcacattttagcacgaaaattattatttagcaatacgattatttttggctatttgctagtattttcaggtggaggtgacgcacgtctgattatcatgactgcgaaataaacgccttctaattatagggaaacatcgagatgaaattttgtcaaccactgcttccttcctcgaggtataaaatcagacgaccttgccaagttcttcgatttcaaattggtttttctcaacaacactttttgatctttccacttagtagtctttcgctcaccaatctaatacaaaatgaagtttaccgccggtgccgccctcgctttgttatcctcccaagcttacgctgccctcaccaacgtcaccttgtgggcccaatccgatgatcaatctatcaacggtaacggcttgtcctccatccacgaaggcgctgccattaactacttcttcttgggttctgctgctcagaccttggtttacgatgacgagaacaactggatttactttcaaccaattccagacttgaagcaatacttctctgtttaccagaccattgtccaaatgaccgttgctactgaagctggtaccactgtcaccattgatgatgccggtgtcttgagtttcgaaggcagctctgacttctatgctcaaaagaacattaatgatccatacagttactccaagacttccttcgctgttttgcaattcaatgatactgcaccagccgatgccatcccattcaagatcattctcaagaaggaagatgattccgctccatcctcagccgtatcttctgaacctgttccatcttctgaacctgctacaactgtttcaactgcggaaccagttacatcttcagaaccagtcacttccgaagaaccaaccccatctccagagacagtagcttccctctctactactagtgaaattccagttgtcactgtaccacctactggtggtgcttccaacttggctgttggattagctggtgccgctgtcgctgttgtcggtatgatcatctagatatactaatttgatttccaatatcgctcatagttttcatttcgcttaaaaaagttcgtagaactgaaggtgtgcttgtttgttttaagtattattaatggctgccttaatttaattaaatatataccaaatgtcgatttaaccttgtagattatataggatcatactattaggggttctgtaactctactttgtttatattttcttttaatagccgaaccattaaccgctattccttgatgatttccgtataagaaattcgtgatgtgcagaattatatcgggtacctttcatctgctttgagcaacaaagactcaaatgggagacaattctgaaaatgtgttagagcggaacaatttactcctttacccgactaagggtagtatcgtacttattacgataacttctgtttgtgtataagagtacgttacagaaatagggtgttcactgtcatgggcgccgagaacagtatttttgtagggtctgttttccttccctattaatagagagatgtctaagagattctagagagcccaagactttatcatgattcactgtggaagtcggaaagtctgacagggttgacattagtgcagtaatgtaaaacaaagtcatatggcatacacattgtgctaaaagcttccatttcgatttgaatatctcccgctggtcggctcgagtggcagttacttgaacaaaactggccattctagtttaattaagggagttaaagggatatgagttccaattgtggggctaccgttttgagcccaactaatattctcatgtagacactttaaaatattatcccgtgatgcggtaagccatcatgagagtacgcaattatggggctcgtggggctttattttctgcgcagatccttgtaattgtttgcagatttcctttttatagaattctttttttcttctatggctgcgaaaagaaaataatctattaatagcactcattttttgctttactgttttaccccagatctcggtagggcacaatgaagccaaattatgatattcagaattactatcattttaatttctgttctgagtgcagttgataacaggaaaacttctttcaaaaaattttgcaatcgagattgcaaagatcttgataataatcaccgcccctgttgatcaaaacatatcctacaatagcaacagcactaatcagatggcgaagtagtagattgtagatgaacaccctaaccaatatcctatcaagtaaattgttataaaaagaatgtagaatctttggatatgatttcgtttggttgtttcaaatcatcagcattcaattcgacatctatcgctatcatgaagttctttgcacttttcccattcgctttattatctcaatatgcttttgcaaaagtcttcgaagttaccctctatgcatcttctgaagattctagtatcaataaccaaggtttagaattcaatcatgccagtcaaggaatcttgtatgtttatggagagtctcagaagttcatcttcgatgatgagaaggggcttctctactttgattttatacctggattgacctactggcttacagttgactacaatattgttaaattcagtactgataagaccaaagccctcaatgtcggtgtagacgacgtcaccaaccatcttttgttgggctattacgaaaacttctgggccaaaaagaatatcgatatagatccatatgaagtttcccagacttacccagcggtgctccgttacaaatcgaagctggaagctgactacggttctattccaatgaagattgtcgtggtctatggtaatgaaattactccagaagtaccttcttctagtgactcctcttcgtcatctgaatggtcgtcgtcttctgaatggtcttctacaactgaatcatggtctgaatcctggtcttcttctactgaatcccttccttcgtctactgaatcgtggtcttctactgaatccctttcttcgtctactgaatccctttcttcgtctactgaatcgtggtcttcaagtgagtcttcttcctcctcttggtcttattggttcgaaaatactaccactactaccactactacatacactgagtgggtcatcacctgtacggaaccaaccactatcacagtcaccacttgtacaaaacacatttgtcatccagcaacttatacctacactactcctacaactgtgacattcaccggtccaaaacctacacctgctacatacactgaatatgtcacctattgcccaacacccaccaccatcacgctcactacttgctatagggacacatgccatccagctacctacacagttactgcacctacctatatcagctacaccgcttctgtaaagccaaaccatcaaattacgatcacagagccaaatacacctcctccagcccggacttctcctgttactagaacaactgtggcaccaatttcaacattcaagcccactacccctgcatctgtagttttactcggagaagcttccagcaggggctacggctcgtttatagcagttgcagtggctttcgtattggcattgttttagagcgcatcatgttcggttggtaacggttatcgttgtttctatatttataaacgggtatttattcttcgcgtcagaacactttttttaacatttattttatattgcttgcatattgtacattatatctcaccattacgtcattgcgtactcctgcgcattttgccgcagaagtcctcgaaatacagacatccattagatcataaatttcgattatcatttcattctttccttcgtatatcagtcccatacacttggtggcgtcatacatggcatcaccaacttgtgtaatgtagttcagccgtttccgtggctattcaaaagccgttttagccttgtatttcatcaccttctcttgtaaaatctattattatctttccatcaacatcatgcattggtatgtacggctgtttcacagtgatgtgggggacattccatgtatcggtggtgttccgggtgtcttggagtgattgggtcacccagcgaaaggcgccaagctcttctttggcatattactctcttttgggcatatttactgtctcgtgacgcagaaaaatggttgcgaatgagatcacactttctaattatagcccatatacccgcgaattagtgtttgcatatcttggccactaaccaatttgtaatatgatattttctggttgctcgtggactcgggttgaaggtttcagttattccatgcgttaataccgggcttccgcgtggctccgttcaagaaagtggtataaaaggaaaggcttgctcctgatattgctgggttttttttgcacccactatcaactaacactagtctctcgctacaagctttatcatacaatgaagtatatttcatcagtgttgtttttactttctgtttacgcaaccagtgtttctgctgtcatatacacggtctacctcggggtttcgtctgatgacgaaacacttcccacaggcttgtcttctatccatgaaggcgctggtatcaactacttcttcttgggtgagggttctcagaacttgacctatgacgatgatcagaaacttctttactttgactcgactcctgaagttcgtcaattcttttcggttgttggaaacattgttcagttgacagttgcacccgatgctaccgaagtaaatgttgatggtccattgttggctttccagggctccactggtggcttctatgctcagaagaatatcaatgatccttacagatactctcaaaacagttatgctttggttcactacgattcagatgctccagaagatgccattccagtaaatgtcacttttacattctgggctgatgttttggaaccacctaccggtctgtatacttttgaactgtctaccgaagtaccagaatcaaccaaacctgctccttacactaacaatactgtgaccactcatgtcacctatactgaatgggttactacctgcactgaagccactaccatcaccattaccacctgttctaaggacatctgtaagccaactacttgtactttcactggtccaactactgtgaccatcactggtcctaagcccacggcaacaactacagtacatcctcctcctccacctcctccaactaccactgtggctcctcctcccccaactacgactgtagctcctcctcctccaccaccaactaccactgtaactcctcttcctccaacaacgattgccacttccaagaccgttgctggccagagcacagctattatctctactttcgataatgcagctgcagtaggtgttgttcacaccttgcttggttcaattgcattcgtcttctacttgttgatgtgaacataaatcttccttttgcaatgtatggtatgataaaagagtcataaaattaaaattcaagatccaagggtcaaaaccaaagtttataatttgctatttcacatcaggattgtttagtcatatcttcagtattcttgtcgctttatttcatttttcggaatattatttttaatgtatactttcattaccataattgtaggatttcaatcatattttcataaactcacattcaattctcctggattaggtcagatttagagtattttctatacagacttggtttcgtaatactaatgtacaatcattaaggtctatcctaatatatatgcaaaggtgaactaaatagtccaagctgtagacacttccggccagaccctcttgtacatgctcatggccacagtgtcttgagaagtcaacttaccatcgaagtttgccttgaaataaccgtgagtaccaagactttccttgataaaaccagttcttcctgacttggtgaacaaaggaatagccttgaaccaattgatgtcttcggcgttgaagaacatataacgaactgtaacaactctcttgtgaattttaactgggtggccagtcaagactgctctttgagcaacgattctggtgtggtcacaattcaagaaggtaccgacaccaacaaactcaatggctccgtcggtggctggtttgaagtagatgactggagcattgttaaaaagtacaggggcaatagcagtggcaatgaccgtgtcaccgttgtggcagaagttctcagatttgtgaacgttgttggaattgttagatgcttggttaaagagtggctggatgacttgtcttctaggaccgtactgtacaatgatggactccttggtaggaactggtttctcgtagtcttcccaactttcaaacgagaagttacacacagccaacttgtgttcgtgttctgacaattcgaagatcgagaacggcgtagaactgcagttgatagtttctaaaatcaaagaaggggccctgatgaatattctgatcttgtttcctgtgtttacttgagtcagtttgatgtattccttgttgatcttattcttggtagctttgaagttggatattctcaataatctgttccagatgcttggggcttctacatcgtgttcgtcataatcccagtcacagttggccaacgacttgatacctctaaatgcactcaatctttcctttcctgattcggaaggatgcaactcgatttcgtcaggaaattctaagtcttctttttctatgtctctgaattccttcaactgtctttcttcttcttctggcgaaagatcaacatgcatgtcgtctccgatttccgtaggagcatattcggttggtgcaccttccacagccatatcctcttcgataatttcctcttgggcaatttctacatcttcatcatcttcttcgacgtctgacgcgtcttccaaaacatcgtcaacaaaccatcttccctggtattctgatgttcccttgggcaacttgaactttctcttaggtaagttgtcgccatcttcaaagtacgttcttccatccattctaaccccaagatcgttaccgtcgtcccattcatcgccgaaatcgtcttccatatctatttcctctgggttcaactcttcaagtgtttcctgttgttcagtgggaacaaaaccagtgtctgagtccagtttgtgacccctactcaacttttctatacgatctatttgaaaatcaccatagcctggaatatgaaccaatctgtctgcattgaaaccaactcctctggtggttccctcgacgacaaggtgaccgtttgtggcatcttcggttgaccaataagcagaatcagccaataaccagcctctggagtctctccatgtgaccgatttggggaatttctggcagatagttctcaaacagttcaagttctctggttcgttttccaaagcatacaatttgtcttcgttggggaaaaaatgagtgaagtacgactgcaaagattgtctgatgtccatttgcaagtttctcttggggtaggcactgacgacattaggcaatactccgataaccgatgctataccctgggctaccaaacttctcaatatctgttctccgtactccttttcgacttcttgagtagctgaaatgccaaatacaacaaaatcagacactcgagctgcatccaacatggcaaggaaatcgttttggtcgggaactataacttttaagttggacttgaaacgagccactctcacatccagcaccgatggatatgcaaactcacgcatttgatcatcctcatctacattgaacaaactggctgcgatgtccgaaggtgagacatcattagttaatgaaatcacagtaacaatcttttctgccccactcgagccttcgaacaattttctcgtcaacttggtctccaagatcttgttgtccttcaattgtttggctaaattctttctttctgtttttgtcaacgttttgagggctttgttggtgccagtggtggatttttcaactttacctttgaattggtttttcaactgacctttggtcgaatgcttagatttgaacggcttgtggtcattcttaagagttgacctatgcgagtgacctcctttagccatatttgagtggttttgagcttgatagaactagcggccctctttggttatggagaaatctgagattttgatgtaattcatgattattgcagactgaaaaatctcatagttaagatgagatgcctaatttttcgcgatcacgtgaacgatcagatgatcagagacgagaaacgatctctgttctgtttttggaaacaatcatgtgcctccagtcatctgatggacatttagggctcaaccctggacactattccttgacacgtgctcaactcaactcttctcattgcgcgactcaagaaaattttgtccgtacaccgtcggtctttgtgcagtcccatacatttcccactctgttctcactctcactgggaaatcctatatcaaaatttattcatatctgttaaaccatagcataggaacgatatcattatacattcaacaagttatagataattgtatgtaaccaagtcggaacaagagcgtcagcctcagcaagatcactccagcaagaaacacgagatgcacatccatattcattgaaacaagtaattgaattgattgtcaaatttttcacttgaggaaataatggataaatctacggaattgaaccaaaagttgaaagaactcttaaatgaactgagagacagggaataatttcagaaaaacagccatgtagttttgaagcagattaggaagagaaacttaaagtccccatgagacagacttcatgctctatttcatgtgaagtgaaaaattaagaatatgagcaagcatagtgaagggcacaatgaagcaactgacagatatatattatgtggaatctactatcattctgtgggccgttttacgtatcgaatagcgtataccattgaatttccgtgtcttatcttagctgtgatcttataaaccatgtaacatcttactaacatcctttagcaatatggctcacgaaagtgtttggttctcccacccaagaaacttcggtaagggttcaagacaatgtcgtctttgttcttcccactccggtttgatcagaaagtacggtatcaacatgtgccgtcaatgtttcagagaaaaggccgctgacatcggtttcaacaagtaccgttaagttagtttcagtatggcaggcattgccacgatgaaagtctgaagttgatgcctaatatgtgtacatttaatttaaaggaaattctcatccaagcaaaaatctctttagagtcactagctttgattataggttttataatttgatcgaatggcttaatatatataacagtataatttggctgtaatagcatgaactgtagcaatcctccaatactaggttgtatgaatcagaaagatggttgatattgtacaagaatactataccgtggtggaaattcactagggcacctaattcatcaaagtaccacttgaaatgctgtctacatttcaggatcttctacttaacgcgagaatgttgacttcaaatctcgaccttttatccaagtcgctcactattttcaattttaaaactacagctaactacaagttctacagttgtgtccctttatatcgacattcaaaatccatcgcctcactcaagagactcttacggaaatcaaacttcctatagggaaaaaaacacctttctcgggaatcaaaaaactatttcgttagaaatggcaacgagcataacttgacaatgtacattatctcgtcgtggcaaatattccctggttactttttgattggggaaaaaggaataaaacatacaaaaatttgcgaagaatcttgaacttatatagagaagtcatgtggttacccggacaaactctgcagccccaaaatagttgcaaaatttcgaacattatctgaatattccagacaaaattttgcaactaaattctactttctgctttaagctaaatatatgagatttgtaatgatacaagtatagatttatatataggtggacgacatagtcgaacttgagtcgtaaacggcaatcccaatccggttgagatgtcgcaatattagtactattgttattaagaattcatcattatgcttcgccgaaggtctggtctatatcgatccggagaattaagagcgatcgcaagagacctatcatggttataaagctggccaaacctacaggtaccacagcaaacacgacgatgttgtagaaatcgaagaatcgcgcccttttctgcgcccctttctttaaatccaagttggaagtcacgaagttctggactatgtatccaaacgtcaagcagcaactgataagaagccagatatgtaagccgtacttgtatccgtaggctgaaaaagttgctacaaggtactgttcgacggctatgatgattgtagacattgacaagacacgcacgattgcagcagaagtcagataggttacgatccagcgaacagtcaagccgtctaatacagaatacgacaaatatgcagccacaagacaccacaagccagtaagaaagtgttctgactgccgggcacttgttatggactttaggtgttggcttgtttcgctgaggtttgcactgttgatggagtctaccatgtagtggctatcaacaaaggcccgtttccacagctggatgaggccgatgagaggcggtattaacgacacgtctcgtgagatagcaagcgcaaagtgctgacgtgcattgagaaacttgagccccaactgtttgagcgaatttcgtttcaactcagactttcgggaagtggcagaagcaggatttgccgccgaagtggatgacgccattgccgttacattagtgggacggtctagatacgctattgagtccatatctgctacgaaggaggagtttctcagaatagaaactgacggcacattgctttccatagaaacaccattgatgtaactattcgacgactgttgtatttggctgtggattccgttctggtataccgactggctttggttgtgattgtagttgaagttgtaattttggttatggctatggctatgaatgtaattctgattatgagtatactgagagttctgattattcacattgtgactattctgattgatctgggtattctgattatatgtgctgcctccatttggatttgcatttacactagcattattcagacggtcatggagcatctgtgatgtctcgtatgacggaacagcttcgtcggggtcgaagcgtggatctagtcctatggccatgtaatccactccggatgcaacacacagggcagaggcgataggagtttctgtttctgtctcgttctcggccacggtgtagtcttcgtcgatctggtgagattcgagagtgctggagaatcgtttacggagtgaatccaaaaacaccatatcgattacactctctgtaagggtaatgcgggaaaactgattcagtagtttcgtgatgacaatgttgtacctgattgtttgcttttgaacgtcacaaaacggtggggtatatgctgtggatgttttgtagcaattgaagcttgctacggccttctctctgggtgttgctgtgtctttccgttacttccagctgttaaaaatgtgtacaagattatattgaatcgatttattcgcttaaattttttctgtgagacacgtgatgcgttgtttcatgtttgctggggatgttgggacgggtcttgggcaacgggtagaggaacaggtagaaatagacggtaagaggtggtatcctagtctctctagtagaactacttgttgacaagtatttgtacaaaaattcctaattatgaaacgaggttaattgctgggaaatttttatttagtgagttccaaaaatagctgcgaaatctgcgaaatacgagccatagatcttgaacctgataagatatctgaattctgaatgagatattaatcaatagggcaatacaattgcattatattatggcaggtagcttttccgtagttgtaattgtcataataatggagaaagttggttttttttcagtaattcgctgacagtctccgtgaacgaaagctgttcaatacaaaagcatgtacttatacaagatctagaccagttctgaagctctgctctattttagattcagttggttacgttagtttgacgtcaaattcttctgaaaggcattccagcacaaaactttctcgagctggctccatttgctctgtcattagaagtcttgtaatttctagcaatgagatcgcagaagggaccgctagagagaacacaactaaaacagcttctattggtaatgaaagttctacgatatatgtatatatatttaccacagagagggaggaagtcccgtgatctcatcatcttactaccatctttgacttccacgccatgtctcttgaccatgccgcactatccgattgatctggcaatatcgattctgggcctgaaatggatttgatggcggagcacgaatatacaatctcagatgattcacatcactatctataccctacaatttctacctttgcacaatctgttctattcttgcgatgtacctgacatggtttgtatttctcataaaaattgcaaaaacatcttgtaacgattagaaagtctgtcaatctattggtgtatgctttaaaattctgtattaactatacactggtatcggcaacattatatacgtagcagcacagcctagatagcttccaactgttgcgagatctcgtccaactctgacttggcagccaagtgttgttcggtcaattcctcgtactttctttcccactcttccttttcttgttccaacgaggcgacctttctttccaattgttcggccttgatgtcggtctctctcaacttctcagtggtttccttcaagttcttgtcggcctcttccaactcttcttccaatacctggttcttcttggtgtagttgtcattggacgtcttcaacgagtgcgattcatcagcagtatgcttgatttcttccaagtcggtttccaacttttcaacctgctcttccaagacttggttctttctggtcaacgactggatctggtggtccttctcgaggttttcctgttccaattccttgatacggtcggccaattcgtccgacttctcttgccacttttcagcgtccgccttcaagttgttgattttctgaaacgttagtattaattacacaaatgacggatcttcactgattgctgtagactgagttcctgatctattgctatttcattcgtggttattgatcatttttcgtccgaaatgtgaaacatcacattgtcgtgtcatagatcacttcctcattctacgccatagcctattaatatctatatccagatccagacgccacagcgactccggggaaatgagtctggcatcttatccaccccatacatacttccttaagcttgtccatggtgattgattacgtgtgaatgcgctgggtatatccaattggaaaaaaagcgagatccaatgtgttgtttaaaatgattcggcctgtttttatttctggtatttttgtgggaaggctcgtgttctgtgtgcaggccgttggcgtttgagctccagcgtgataaattcggcaagggcgtatatttggtttagtgttgggagtgttgcggcatggggttttccgttctggcggggtacaggatcggcttcctattggttggttggagtattgtcgccacagtactggtcaggattctctgactctgctagatcggctatgttctcttttcgtgtaccagttatcggttgctaattcaattggcttctctgtctgcaggactcaccaaaataagtcaatacgagttgacgagttctgatagacaataatcacacggaggcctcctatatgccaataggaggaagtcatgtgattagactaatgggagcggtctgactggaattgagtgaaagcagagaattgggtgaaaaacagagaattggaagcaaatctatttgtctgtctaagcagcaagattgttgagagtattggatctgtaattgtcgattttttagaaatgtgctgcgttttccaacatttctggttctctgacatatccgtattctcttatctgtctagcactttcctacggctgcaacatttcagtcccattttacacgaaaggttttagtatgtaggtgcaatttggtgaaatttcacagtctgtgtgtagaccgtttcttcttggttcaaatgccatacaaagaagttatacaaagaaggcttcgttgactatcgatgctctactccatacatttctcaatcctatttgttgaactagaatgaggatgtagaagtgacttttgttcaattcggtgctcttcgtggagtttcacgcaaaaaagcagcctattgcctaaatttcttgcccttgtcgccatcctgcaactcgctccccatttgaaggatatgatcatttcgtctgcatctccagaaacacctccttactcttcagttccaacgccgccgttatcatcagatcagaacttttgccagagaatgtccacccgcctaattgggtcaattttacgaggcaatgcggctcatatgcaggcagcagcaaccaaatggttttcacagccagccatcttctggcttgattcacatctaccaccactcgtctggaaatcgtaaggggcagagtaaaaaatagatttgccaggcacgctacattctctgttgatgggatcaaaaaagaagagcaagaaagtttaaaaacttgtcttttcccgagagctcttcttcagtccacattttcctcctaatgtcatcccaataaagcgagtccaatagctagaagttcaccatttagacttgaatacactagaattacacagtttaagctgatccctatactaacatctaatcattaaatcattttcagtcatcgccaattatatcatatctaaacattagttcgtcatggctatggttcttctatcgggtaccaactcgtatgtctcgtcagagaacttctcgaaccattcccagaccaactactaccattcccaccccatgccttcgtctggatcattgtcccgaagatctggaacttccagagactctctccttacaccttttgacagaccccctgtttctcctgaagtagaacacaatccctttggtattgtattcaacactccaattgctcctaaaccgttcatacaaaatcgaaccgaagaatccatttttgcatctcgtccaacgttggaaagagcctcctacaaccaaattgaagaagcaataatgcaaggaaagcatccagccataggtttccatcctaccagacctgtgaaccaaacggtgaccgtcattgaccaactgtctctcaatcgtaatggttccatagtatccagatcagcactcaaacacagaagcagtatcagaagcaggaataagatggtgagaaagaatgaattgcctctagggtatgattcagacgataacggcagaattaagatcaaccgttcaaaatcagtaaagttcaaaaagaaaaacaagttcatgaactatctcttccctgtaaagagaaggacctcgctcaagtattcgcctttgaagtacacttcaaaaccactattctctgaaagagaacaacttcaacaattcttgggtaactttacctcttccgatttgaccaaggatgtgatacctttacaaatgatgatgtttagttacaagaaactattaaaagtatcaccagaactcaaaagagctagacaactctttgaattggacgaacacgacaacttccaacattttaatgcatataccaagaagatctcagacccagccacagaacgctctaaagtaacccacagacatacatatagcaatatcgacttcaacgagattgtgtaccaaaagtacaagaaccatgtgttttcgaaaaagttggccactgtacctaaacttgaggaggagttccctaatgacatacatctattaaataagtttgaaatcgatcagatcaataagaagcttcttcttgaagtattactcagaagaaccttagctgccaaaattggctacaggttgcagaagagtgaatatgtattcgcaactacatcttcttcttctacgagtacctcaaatacagacactacttcaagatttccatcgtctcaaggagaaaatgaaggtaaaccaaagggatctcatggtaaacacaaaaaggaaaaagacaataaaaaagacaagctgaaggaccaaggctcagatgaaagtagtagtagcagagaatcggttgacaccgacgtcttgatgagacggaatgcttcattgtattctgagttccttccatctcctcaaataagctattcttctaatatatttggagacttccaattcccttcacaagcagaaggatatgagcctgttcaagatagcgaatatattccatcgagtaggttgatgccacttccattgaaaggctctctgccaatcggatctccagagctgttgtatgttaacgacttcaacaaggcctaccgcaacaagtacaagacccggaacaaggttgatcccgtagaaaatttgttcagctccaactttcagttgatgccaattaacagatccattgtaacattgtcatcttccggaagtgacaaattagtgacaccaaacccgactttcagagacaagaacaacagttctagtagtaaagagacatcgtctttggccaaaaccgataattctcaacacggaaaaaggaaatacacggactccacgggccatacgtctttctttcataataaggagacctctagtgaagactctttggacaaaagtagacagagcaagccttcaaccaattcgtcattaatggtaccttctctggtgcccatagttggatcttctacccttgcaaccagtgtcgcaccagcatcaatattgcattctcctcttgggcaactatcatcaccaccatccctaggctacactcaaatatcccaggcatatggagcatcgtatcctcagactcctgtctctataagcatcatagaatcgttaaacaagaatggacaagttaccaaacagctgactacttcgcagatcgtcctccagactctgcccgagcacgaagtcaattcattgaagggttccatttccattgctggatcgaatgctgcactttctactgtttccaatcctagcagatacgctacgctgactaagagtgacagaaggtccccatccaagtcaacaaacagcaacgacagtttccattaccgtgagaaatcatcgttgctggttctttctatcggtgcagacagaggatttgaagaaaagagtcaaagtaaaaaagtaaaagaagtaaagaaagaaaagtaaaggaattatcataaaaggttaggacgtattattagtaattatgcacgggaacataggtagttttgtaggtatggtacacctttctagtataataaagcacattatagtacagaataaattaaagcagagattcttcacgacatatacgccattggtaacatgaactcttgattcacgaattatataccattggtagcatgaactctctgattcttttagcagtctcatcatcaggcaactcttcagacaaaccggtattgtttcgagtagggtagtacgattggtctagaacattgagcatgaacaaggggatcttgccgtctctgacaccttcacagacggtaagcacttcctgtacacctatgagacccgactcgtggagattgagcaatctgttgaaccacttccggtccttgatgtagaaaggaagtgagtctcttccattagttacaggtggagagttgatggctgcgatggctgcagttgccaaagcattctcgaaatccattgtgttggacgttgtgtcttggagtgagtttctagaccttttgagagctggatctactgagtcttcgtctgggaccagttgttgctgtccactgacgtctggatcggtatcatccgtcaatgagccgagagacttggaaaatggaagcgaaatatcagaaggtatatccgaatgggttctcttcttgacaacagactgttgcacctgttgaacctgaacagccagatttacgggtgccatcttgtgagctctggctggaaccaaaggcttgaagtactcaagactggcttcctggtagtcgaacttggggatgtccgcgtaaagatctcccaacccttcagcgtacttgggatctagcctgatgagcaacggcaaaacctcattatggtaaactgacatgtagcgcaagttgtcgctcaagaagaagtcgttaacaatcaagttgcctttgttaaacgactggagatgtggaagcagaagcgaatcgctatacaacaacgacttgacttgtctttcatcaagaatcaacgtactgttagcattgtcgataacttggaaccggcccaattctggattccaccggtatgcgtaactggtagcaggtgcgtttttctggtgaagcatcaagtagtaccaaatcttatatcggtgatgattcacattgagcaaatgctgctggcacgagtatttggtataagtggaatagactgtttctgggttggctgcacgcaactggcccgtgacataggcccatgcctttttcgtcatctctgcctcagctcccttgggatagctgtgcaccacatctgaaagcaacttgatgagaaactggtccatcttaggcgtccatctacggtacttcgagtcgcgcgacttgagatcatactccgtgagctcaaactcggactttccgagtggtatctgcagatactgctgttgttgctggttctgatggttttggtgaatttggtgattctggtgattttgttggttcaaatggttttgattaatttgctgctgtgtatgtgtttgctgctgcgcgtgcgtctgttggttctgatgcgtttgctgattctggtgagcctgttggtggttttgctggttgacatggtgctgcatccgcaggcccaggttggggtgctgctgattcgaatgagtctgatgctgactctggtgatgctggagaattggtagaggctgttgcctcagaagaagcagcatgtggtgggggtcgtcgtggtgaagctggttctggttcgtgtggttttgctggttcaggttttgatggttatgggccagttgttggttctgatgacccagttgctggcgctgatgagctgaactttgtgccgcaatccgaagagcctcagcgtgctccactatagacttcctgagactatccggcgtcgacatggtgccgtggtgaaataagccggaaaactggaagatgtataaaaacaaatattaccaaatgctgtttcacggagttcacgacatcttttgaagtttacagtgcaattctgctggttggtgtcacgcgtgactctgcacgtgatttcggatgatagcaggtgctgagccctgacgagtgctatttggggcaacaagtcacagcagcagcaactagctggaactgtactttagttgttcagaatgtggagggaatatgaaaaattcttcaagtttctttggccaaatttggtggcggacttcttcagccagtcgctgcttcgactaagtgagcgtgcgtctctgtaaggccttttgcgccaactttccgtcgtactctgggctactgcgaattcaaaaaggagcttctcgtatcgactgtcaattccactgtcaagtctgatcctcagtcatgttcgccttgccacatgctgacatccatactggcctccacgccgtatcctcttcgtattctggttcagcaatctctgaaccctgcacgtctcataatctaatctacaaaaataatgagtagtcgaagcacgtgatcttgaggcttataccagccaatgtcgtacatttgtcctagaaagtagaggttttagccactaataagatgtaaactatcattctgcgcacctctctcttttgattgttcgaaatctggttcccaacatctgtgatgtctcctctgtcttgcattctcttctcgcaagaattagtctttatctttttgcaagttggccttgctgcgaaaaaaacaacgctcctgcatcatgcacagtcttttttgatctgtcagggctctttgcatcaaaggaaaccaaagtcaagtagaaccaaaatgacaatacctgaaagtaccacaaaaatctaaaataataagaactgatatccatgtggcgaatacctgttgaaaaaaaatgtttaagttgttctatagtgtgctcagttttcagctctgtttaccattatgtccatttattactatacaatctcaatatcacatccgattcaagccaagtctgctgctgctagcgcgtttggcaatactcttgccgtcttcatggatatggccgaagtaatccttcttattctccgttgtactggaactatggctgattaaccgttctccaccttttactgacgcaccaggattgatgttgaaggtgctattattgttgctgacttcgtattcgctgtaatcttttagtttacgttcaagattgtattcttcgtgtttatcctgaaccttggtgaacttgtccaacatttcataaatgcgcttcctcttgatagagagctggttgctgactgctgtggcagtagtgccagggcctggcgtgggcacaggggtactcaaggggattccagtagaagcggctatactggcggtgtttatgtgtgagatagagcctaatctgttcttaagcgtagtgaacgtagatgattgaggtaatatcatgagcaaaccatacaacgttttatacaagtatggatgcttttccggctcaagtaattgcaatctcaacttcaaaaagattggagattcgagcaactggaccaagatatcaacctgagtcaacaactggaaattaacttccagttcagataagctcttgatgataagatatgctaactcgtagttcgatgtaagcaagcacaaagacaacgcgctgggtgcgttgtggcaccagctctgaaacaacgttgcaaacaaagaccagtcttcgagcttgtagacatctagattctttagcttctttctgaagctggtcaattcttgtgtagtcaacaagatgttgttcaaggtaactatcatcatgttgagaaaatcgagatcatcgatggacgacaaaacttccgataaagtcttgtagatcttttctgagttcaatgtgacacacaacttgcggattatgaactcgatcttaattcgcggggcattatctgacgatttctcctggccctcttgttcaaacaatttcacgagctttatcataaagtccttaaagaactcttggttagattcagaaattcgcgacaaaagctgtaacactttcaagattacatcgtgactggtatttgctgaagactttaaaagatcagtaaggtcaaacttgtgttcgtcttccccaatgaatttgaaaaatccatcggcgtacttggagtataagaagattaaccattccaacgaagtgattcttgcaagctcgttgttagaagtcaagtattccttgatggtgatgtctagagtattgggcaactggaaatcaacaaactcatcggtgacttctttgttcaagccgtggatcaagttttcgttaacattctcaggatcatcgtcttcttcggcttcttcgccgttgtcctggatctttatcaagaagttctgaagtgcgagattgaagttcaaaaatgagttacggagttcgaagtctttctcctggtcggtgattgagatatttctgatgataatggaaacacaatcgggaagatacttggcaaatccgactggagaaatctccaaaatttcctggagccatttgattactatgatctgaatctccaaatacgtgtcgtgagtctcgttggcaagactgttgaacttaatgtccttcttcagctctggcggaaatctaacaaacgagagcaagatgtcaatcacattggggtagtctatgaagatatcctggccgttgaggaagatctcaccctcagaagctgcctcctcttcttgctgtggaggtaccggttcttctgaaggctgtattttacgaacaatagtagtgctgttggacttgattgattcggtatcactcacagacgattgcaactgcacttctgtagactcttcttggtttgcagcagcaatagaagcaacagctgtggcatcttcaggatcttcagcagcaagagcagctgcttctgcagctcttttcgcagaagccttctccaacaacgtcctcttcttctccttgaccaactgacggcgtttgacttcgaatttgacttttgaaatggccttgatttccttgaggaacacggtcaagatgttgaccgtttccaaacgtacatctgacggcgcgttattcatgagaaacttgatcaacggctcgaggaaattgggtaaaaatgtgatcaactcaagcagggggatatcgtcaaacaactccaaccaactgattaaaaactttttggcaaacggatcaattgtgtacattctctctaaaagagtggggatgaactttggtaacagaaatgccttctgggcatcttggacctggttgacttgaatagctacaccattggcatccacgagatgggactgaatatcattagatacttcctgttgctgtaaaatggacacataattagtggatttggcagaaacgatatcctttatcaaacgatcgagaatatcggccgcgttcttcacagaagattcgctatcggttacaagaatgcacaagatgtcaaatacctcgttgaagtagagcaatatctcgcccctggcaattttggcgatgttgtaaagcgactcgcatgcatagtaacgaacccgggcatcggtgtctctgaaggtagcgaagatcggcttgatgatttcctcaagaaagtaggctatagcaaacgaaccaagagcaactgatactgagcccaaagcggtaattgcgcccatcttggccagattggtgccaccattggtgagttcggtcaattcgtttatgatccggtagattgtctgggagtcgttgttagcgagagcagccttggtgagcgactcgatctgatacgcggtggcttttctcttttcgtagatatgattggaaagatctttcacgagcgacggctccaacactttgacatctcccatggtgagaaatgaatctggggatgtgaaaggagtcaattggataaaaaggaaattgatatggaagaatcgaaaactcaagaatgattctaattattcaaatatttcatttagcgtggagactgccctctggtatgcaggcgataaggaaccaatttaatataagaattgtgaaaaaggacatcttattataatgagaatttgttataatttatgagatttaggatctttggagaagttagacatgtactacaagagaagggtgaaattcactaaatacttatgcttcttaggaaatgatacatacagaatagattatccgtaatacagtatatctatctcggccattttatataagcaccattcacatacaacattttcacttcatgatatattacaaataaatagtcctagttactctatcagcagaacccccttgaattaaattggtcctagaccaaacccaataatattgaataaatataagctttagtgacgaagcgtgtctatatttctagcacttgattcctggctcgaaatggttcatgccgtcatcgcttccattgggctttctcttcttcgctctcgatacgccagccggttcatcagcccatttctgagtgtagaagaattcctcttccttctcgtcaccatccacattgtcggttatgtctatgtcgtcgtagttataatgagactcaaagtcaatttcatcctctttctttctgctgctattgttgctgtctgtggcttggctcgatggaacactatcgttagtgctatttaaacccggaatattggccaaatgtgtctcttcaaaaatagtgctagctatgttggccgttggcttggtggagggtaataccttactgagaagagtcaaatcctgttctccattaagaaaatcttgaacagatggtaacttgactttgaagttaatgaataaattgccttttttatactttctgaaatcagatgcttccgctggcaaattgctgttttgaactaattgtccgcaactgagcaagttgttaatgggcattcccaaccccttgactattttgggttcgtctggattcaccgttcccacgacttcacccaactgaaggtcttcgtctatagattggttcaaatctctgaagccatggacgttgatcaaaatcttgagggtatggttggttcttaagaagtccggaataagaacttctccacccaacaacgccgttctcaagtctatctcgtgttccatatacaaatcattatactttcgcaccaagaaaggatgtgatgtctgattaatatggattataacgtcacctggaatcaagtttctgccttcgtcaccttcgccgcgtagaacgattttgtcgccgtttttagttcctggcaaaacgctgatctcaagaatctttttctctcttaagtatcctagagtgcagtcgttacacttgtcaaatggagctatataggtcccggtgccgctacagtttctacaggacccagtctgttggtattgggaaaactcgttgtagtatgtgactactacttggcccgaacctcgacatgttctacaggtcttcggccttaatccaccatacccatcacagctacggcacttgctgttcttaggaagctgaagtttgatcgtcttaccgaaatataagtccccaagcgtcacattacaagtgtggtggatgttctcaccttgaaccggagccctggctgcagaaccagctggctgaacattcttcatcatgttagcactatgtgccgcacctggagcctgtgctccaccaacattcatgaacccaggcgcaaactcaaacacggtctcacccgagaagatgctgttgatgtcgttgaatacctgagaaaaaatatctgtcgccgaagcgaatctttggcatggtctctggctgaaaaaggaagatctgccactacccgtagctacatttgtagcagtcgctggaggttggtacgtgccatctaaccctgcctcgccgtactggtcgtatattcctctctttttggcatctctgagaatctcgtaagctctcgtagactctttgaattgttcagttagctgtggattgtggttggttttatcgggatggcacttaagagctagccgtttgtatgctcttgatatctcctccgtggtggctatcgtaggcacgcctagaacgtcgtataggtgcgtttctagcgacatttcatgagattgttgaaatgagttttagtgatgtagtatttctatcgaatcttgaatcagacgatcttacaatatatgatcttatatagtaagagctatagagttggtgtctccaatctgatacaatctgataatgttaagggactttgatatcgctatagttcctgatgccgttgatatctaatggatatcctgttctttgtagataagctgattctatattgtatacgttgtagaaattactgttgcttatccttattacctcctagatagctttgagtgagtctttcaaggagctttcaatgtatcttttatgtattttgtaccgataatttggaatgatactctatggggtgatgcttgaacgattcttccagacctcgaaaatctttgagtgtatcaaaatattaatgaattttaaaacttttggtcaggaagcaatcttgctattgtggaaacaagaaaatactctcttatatatctttagtgaataaatatgtcttgtggagtggcgatgtggagcaagattccatataattacagtgatgcaaaatcctactaagtagtttggtgtgatcgtagaaagaaaattcgataagattctttggttacgtaagcgctgagtcacgcgccctgagatgttgcagccatacagaagtcgttgcaatttgtcagataagggagggttacattctatagagcccaaaactggaaaaaaaaatagagtaggataggttgtcacagtcagtttcatttagagtggaaatagaggttcctagatctgttcattttcttttttttgtatttctgtacatataaaagtctatttgtattgatgaacagtaccgcaattaaaatatggaacattggtcttttcagaaaagacgttatagcaaacatttatgaatttttcatcaaaaggacttgaattagctaattcaaatcaacattatgttctatttttcaatataacattcttcttttcattcattttttctgttaccttcatctctattgccaatcagctcgcattctcttttcatccctacttgtggtttcagcatctcattcaattcatagtacgatactacttacttcgagtctttgttgttgatatcatgctacttcttttagtgccctttacttccaacataacatgatattcgtgtacatatatatatctatcatctacatgggtcccaagagctcgtcacggaaatgcttttggaagttaactctcctgttcttggtctttctctcgtagttgtttctgacctgcagctcgatctttctgatctccttctcctccttcgagacttgatatgcagacaatcccgatgcaaatctacgatccacaagagccaccgtcttggatgattcactgggctcagtgggcaaggcgatgttctggcgataatatcttgccatggacctgtggccaattctcgagccagtaggcaatgtcaactctaccccgcttctgtctacgtgaaccaaggagtagttgtcgttgattccgttgtcgattgccatcctatcgtcatcatcaacattttcatcgtcatcctcctctctttgttcatcttcatgaacatccacaagtatttgatcatcaacttctttaaatgcaactgatttcgaagtgctagctctcttcggcttttcctcctccgtatagaagtcgtagaactccgccatcgcctgtttttcctccttgctctcatacggaatcttgcaatgacccttggcgtagatatgctgtctgatactctccaagtttttaccctcaaagccacacaccaaacactcgtggtctatagaaactacttcgctcaaaaagtggagcaacccttccaaatccactaagtaagatctttcgggtatatacaacccgtgcctactgtacatatgtctaatattgttctccacctcatggttgttgtccccacaatagaagcaatgagtgatcggtatagattcgatttcttgcaacgactctgactccgactctacatctgcatcatggtcttccacttcgtcttcttcgcttagtaagtcaccttccaagtcagtgaagtccgactccgagtagtttaactcagagcctgtttctgtggtagaagccacttcatgaagttggtcggaatcaccaagtgaaaattgcgaaaactccgaagctatggaagtcgcaggactagctgctctcaaggaagatccagaaacaacttcagactgttctggtcttcctctggcttcgtgtaattgtctttgctgttgtttgatcaacttcttggtgatctgcctgccatttccggtggctttggtccttctacgggctacatagaatccatattcgtcctcctcagcaggttcctgagaagtttgctggttcaatattttttcggcaaaaacgtctgaggtgatcgatggcaactccgccacacgtctctttagattgtaccggtgccagtcggtcttcatatgctgtctttgcaactctgccgtgacaaacttgattccacaggtattacaggtgaaagaggctgtctgtgggtttgagccatggggcataaaagaaggaacgctcatatcgaagtttcagtactgaatttggtcgtaaatgtaaataagtctcctgaatcgtagtgttctccacgaagaattccaaattggtaggttttcttcagataaagaaagcagatatgaattcaattggagatgctgaacattcgataagatggagatattgcaggttacgcccgctagtgtgatcatagtgcgaccattactatatggcatgatacactttacatcttgagccttaatttatgcagtttgccctaaactgcgaatcctccagtactcaccagaactgaaaattttagaaatttcatggattgtacaattccagcttccactccactgcctccaaaaacaacacaacaatgggtgtccacgtctttgggaagtctatcaagcacaactcattggtcagagtatgtatctcgtaaaaccgcgttgagaatcggctcaaatttgcaattatagaaatacttaatatcaactaattcagatttttgaattttcaggttcttgataagtttcagcaatgtagtctctttgaatttcaagttttgaactcatactaacaagtttcagatagggttggccaaggccatctttggaatcggttaccagactgctgaaagaatctgtgctaaagtcggcatctacccccagatgagaatgaaccaattatcagaaccccaaatcatggacttaaacaaagaaatctccgatttacttgtggaaggtcatttgaagcagaagatcaacaacgacatcaggatgaagagagacattggctcctattccggtttcagacacgctcaaggtttaccagtacgtggtcaaggtaccagaaacaatgctgctactgctggtaagttgaacaaattggagagattcagagtatgagaaagattccatgcttgtatattaggaaggctgatgaagatatcagacttgtgcattcttgtaaatatcaatacaaattcacgaattggcatatcgtaggataatgtagagaatttggggaactaattatggctgagtttgccagccgaataaggagtgaggcatcatgacagtcccaatactgcttccttgaaatcaaatacattaaggatatcatgattaagtacttcatggagaaacatgagagtaagaagattcagctggcgatgtattcgcagtcaaatcagattagaaaatgaatttcagttaccactgctcggtgtctccggaacccgttgcgcaagaaaaaagagagtattaacattcgccggatatgtttcaattcatcactattcttcatgggtactatagggtcaaaccagaggatcaatattcaaaaaaaaaatatggacgagtccggagtcgaaccggagacctttcgcatgctaagcgaacgcgctaccaactacgccacacgccctattggatacagttaaatacctcttttgcagcagtaccaatcatatatcacgtgacgttctttttgaaatggccgatccaccgcttggtttgggtccccgtaagtcccccagcaatccgcgaggtgagcagagtcgtttgtcgactcgtgaactctccaatcgcgctgctggcgacgcaggaagcacacctattatgacaaaatcccttattgaagcttttgacaatgaaaatttttcgtcgagtgaaaatgtcgcgcgtgatgcggaatccgacgacaccgacatcgaccccacccttgactctgtcgcagataaacaggtttatggcctgcagaacgcagaatcatcgcagcaagaatggctgcaaaatctctccgatgaagaaaattcttcttctactcccacctatgcccaaatggctgctcagttctctaagaggacttcatcgcaacccatctccaaaaaatcttttgctcttgaattccaaagactcgaacagtttcccgaatttcttaaactccaatttcactctctccgcatggaacaaaccgtcggagacacgatttcctgtcgtattcctgattactctcctcaactcagtgaagcttttgccgaaagcatccaaaacaaagtgtgtgacgaagtctccctctttgctgaccaacatgaagatcttgaagcccagatgcaagtctcgcaagaagactacatgatcgataattcccctgaagaaatcgcccaactcaataaagatgatcgggaccatcttgcaactctcgaccatcatcttgatcttctttgttattgctattccttcgaaatttctgacaatggtctcatccgttttccaattccattgtgtactctcgatgaatcagctggaacaaaattgaaacgagaattaatcaacctcgtagaggaccttgaatttcagcatcccatcactaaacaacctttcaagctaactttcagaccccctacctcgaaaaaatatatcttaggcagttttaaactccctaagctatacagtagaggtgcaaactcgtatatggactactttcttaagggtgttggaaaacgcattgcctcagatgcacccacaaacaaacaagtgaaacgtcataatacacaaatatatggtaatgttatttatcattacctaattgaacttgaaggactgatagctcctccttccactatcaggaaaccagttcttgaggatatgtcttttcaaattcaaagtgattgcattcattgtacttactgccactcccttgaccatacccgaagaaaatgtactgttgcccaacaatgccgtctctgcggactgagacaacatgcaacttcaagatgtaaggtcccaacgactccaattcattatcaagtgacacgtgaagaagcccagaaattcatcagaaatccttccatcactgtcaactccacctcaggcactccaggctcctcaggcccttcacgttcaagtaacattacggttacaaagcagccgaaatccatcctcaaacacaccaatccagtgacggttgacgaggacggttttctccctgcttcagaagccaacaggaccactagaaaacaatcacacaatcgacatgctctgtccagacctccttccccaacgagttctatttccagacagcgagatgaatctcctaaccgagacccacctccgccttctccaaacactagaaagcgagctagctctactacaactcgttctttgtcacaggatgcacatgcttccaagcatacgaacacaggaagggaatccactagctatatgagttcaactgaagtggactcacaagctatgcttccttcctcctccctttttggctcattgtctgacaatgagccaaaccgtctgccacaatgattattcattgttggcagcggatagggaggtcacctggaacctccctacacaccttagagtgtacttcaattccagttttcattttcatttttatcactaatttattttcaattccttctttactattatctgaaaatcactattcaatcaaaaaacaaagaaaacctttattcaaaaaatcataaatcaaaaaaaaaaatataatgacaaaaaagaaaaatcaaacaattgcccatagtgcaaatactttaaaaatttgcacccaaaacattgaacataagggtcattttcaatacgcttgcgaccgtatttttcatattttcaatcgtattaaattccttgacattttacttattcaagaactacgtctcgcatcagaagaagctctcactcatttccgcttccacctctctggaaggggtcttcaattgataattccatactacggctgcttaagtgcaattgttattcaaaaatcgattctcaacaagaaaattactattcttagcaacaattccatttccattggctcagatactgatagtagaacatgtgatgtcgacttcatgattgaaggacactcctcaccctatacacttataaatatgtatcttgaacctggccaagctggccctcaaacccaaatgatcacaaaaatcaagaattatatacgttctcatcataatttcacccagctccttgtcgggggagatttcaaccatgttcttaaccctgatttggacgctttcaaaccccactcatcctggcttagagaggtacaaattcgtgttgcgttcactgaattctctagtgttttcagcttacttgattgcttcagacatttacatccaaatgaaatacgtttcacaaataatgtcaggaatggactatccccaaggcgtttagatcgcatccatattaactcacacttactaccaaatcttttatcatgtgacatccaaaccatcatcaacaactcaactcatgattcagtcagtcttacgcttcttctttctactcaccctcaaatcgttttcggaacatcccgtaagaattttcctgcttacattctttccgatcctttcgtacttgagtctatcttactgatacgtcatcttccattatgtaacccttccattgaatgggacatgttattaaaagaaattgatgaaagggttcatatccttcatcgatatcttgtacatgcttttccccgatccgcaaaacctaaaccagatccatcaaaacgattcatgaagccggtcaccgactctataatcacatgtcttaccaatgcacaacgtgagaccgccaccaccactcccactatcctaaatttggcatacaatttcttcgctaaactcaaccgacctcctaaaaatattgatctatccgaacaagatttcttccttcttgatcttccctttcggctcaccacaacccaaaagaatgaccttgaaactccttttgatgtcaaacaacttgaatctaccctcaaactggttaatttcaaatcagcaccaggagacgatggcattaacttccaggtacttcgagatctttggccaatagttggcaaacctctaaccgaagtcggtaaccacctcatgtcaggcggaaaattaccaaactccatgaaatacgttaacatcattcttcttcataaaaagaaacggtctgacgctatcgaacataaaagaccaatttccttaatatcaacaggattgcgtcttctttcccttcatattaatcgttgcctcaataaggtctctgacaccttgattggacgcgatcaagctggatttattccaactcgcgatattaatgaaaacatattcaatctccgtgccattactgatcatatccggaaacacaatgacacccgttcttatgacgaatatacctctttggtttcgatcgattttcacaaggctttcgatagtattcaccatccctttattctcaaaacccttaaacaggccaattttgggcctcgcatcataaaatttcttatggccgttaccacccaacaatacggtcagctctttatcaacggcttcaaaagtcggtcgttccctttaaccatgggaacccgacaaggcaaccctgtttccccatttcttttcaaccttgttcttgaaacttttctagttcgagtacatttttcattaactcactttattcttgatcacaacctttgtgcggaacgtcatttcacatacgcagcatatgcggatgatgtgattatctacactcataccttcttcgaccaattttcacttctcatgcttttaggagaatttgaacgtgcctcctccctacgggtaaatcccaataaaaccattgtctactctctcaccaatcaatctcctcctgactatttaagacatcttccttatccggtacaaccttttgatcctgataagtttaaatatctaggaattccttttgccctatcagactacgacaacagcttatcctccccatggggcaaacatatcggattcttacaagccaaaattcgctccactccagtcgatgacattcctattgcccaggctgttcaactctatggcagctttatcttctccaccctctatttcaaggacattcactctccacttccttatcaacttatttcctcgcttgaagataccatctgtaacaaatttcgattcaatttaccaccctcgattctttgcaaacccctctccctgggtggattcggaatgattaacattcataatcaacttgaaggaaaacgggcggaacaaatttttaaacttctccacactagtgacaattttgagttcaatgccattaagatcgcattacaaaaaacgcttgaccgcaccctcagaggtacgattgatctttactgtactccttctcccggcagaccccttcgtcacttccattatccctggtacaattttatctacggtatggaaaaccttgtggtcgatctttatcgggacactcttcgccgtcttccagctccagcacggtcttggttgcaggcgtggttccgtctcttctctaccgttcatttctcgagttaccacctggccatttatatttctcctgctgaactttctcagctttatcttcctcgccggtctcaggacactatctccttcatgtgggagaagggccccaaatcacgtcctcttgacccagccacttcattccacagtatttccaagaaactagttgataagaccccggttataccatcatggccatcacgactttccaattttcgttccccctcttaccgagactggtccaccttttggtccaaacttgcctcatttcagaaagggtgccctggtgctttacaaccctatcatctcttcattcttggtcggcttcactacccccattttatctctcaacctaatcccgggaactgtttcctatgtggacaggttcctgattccatggttcatgtgatctttgaatgtcctgtcacacttcatatttggaactcttactcgcttccccttcgctccttctcctttgtgattgccaatcctctgattgatcgatcttctgcgtacaagatcaacgagtatattgatggggttctttctctacgcttccgacgacgtacctctctggctcggcgccagcagatggacacgccggcactagaagaatggatactcgccaattgtacgcttcgttaatttatgtctttattctctaattttctccttcatatgggtttttagtgagtatactgactttgttcaggagtctcacactgtcaaattgattgcaaaattatcagtttttcgtgcttaattgcattttctcccttgaatactcttttcttcaatagttcactatgaagtatttcactcaaggcccaataggcccctatatatttctcgtatggtttacataggtttaatatatggtgtattcaaaaaaaaaaaaaaaaaaaagtgattttgatcgcctgattattatcacctgatttataattttatccataatggcctttatctctagtttatagctgttagtacgttcaatgattgccactacgtgaaaaaaacgtgaaatgtatttcctccacacttcagtacgtattagacgaagatttatatcttaggtattcaataagttgtacttcaatagtaaatgccatttcctgagaaaaaggctcctgaaaaaattgcaaccatttcataaagtttaggttagtcgggaacacattgcaatttgttaagaaagagagcaatagtgtcttggttattgtcaatattttgactctcctttaagggtatcctccaatgtaactgactactctatatatgtatgagccattatttctttagattttacttcttctaggttgctattctcgaactttattgaattcgcaacctttctataaaaacctaccaacttgcctttctctctgttgtgtccttaattagttaattgtccaaaatatgctcttttgttatttgtagatttatctatataacctcggtagatgtttcatctgtttgcaagttttgtatcagcaagtttttcttataagctctgctatctctacgcttcaatttgttcatctccctgattaattgaacctgcagacttcaagaaaattagaatgatacaaagaagagatgataatgccgtgggtgatatatattccatgtaatgttccataaatccaactgtcagatgtcattgataatcgatagcacataaaaaaaataatatagaagaaatggatggtcttaacgtaactgattaaaaaaatggacgagtccggagtcgaaccggagacctttcgcatgctaagcgaacgcgctaccaactacgccacacgccctaacaaattagagaagaaatggtccctagcaggatcgaactgctgatcttggcgttattagcaccacgccttaaccaactgggccaagggaccttttcatgtctggcaaaaaggctctgtaccctcagacagtacaaaaatcacgtggaaatcacgcctaaatcacgtgagctattatatatcatcaatgttttgaatagctgtatagtgaggtgtaacttggtgttaggtatttaaaaggacttggttacagttctagtacaggcaaccaaatataaactatgatgctgagtattctgtctcctaaaacaactcaaatggtagcaaacgatgaacaaaaaagatcacgtgactgaaatttgggatataaccaagtagcgattcttaacattatttgtagtcagtactccccaagtttctggatctcgcaataaagccagaccaggaagtcaacaatagaacgaaatattgtaagattttatcaacttctttaattaagaacattctaagtagtatgagtaggctcgacccttcaagtctatggtagtgagagtaagcaatccagggactcatccaagagaatacattcaatatgaaactaaggaatatcttggaaaggaaagtagacattccaggctctctcctgggctccttatttagtaaaactcttttcgaaagggcagataattggagcttgaaatggagttgcgctctatttcgttctgcatttgcgcttttgttccttatcactttttgcagcaattcggttctgcaaaattggagatgtatttaaagggaaatttccccaacttttctgtactttctctgttctgatttcttctctttctttctctatattccatcttttgcattaagctgctcttaatttcattccaagcatgagcgagttggcagtcaatctactcaacaatctcactttgaaagcccatcgtctagtgactttgccgtattccactgttgaagctggaacctacctttatcccttctatgtatgtttaccaaaagaattatcacattttgtaatcacatcagccagcatatacttttgaatttctctactaaccaatagggtctatactacttcgtcatccatcccgatctatggggattctatctaacggtgttggtccctcagcttttactaactctattggtgtatagtatcacgtttctactactatatccaatcctggcactaatccaggtactcatgactggaccaatggggttgttcacagcatggatttcggttctacagcagtcggccttggtttctgcctttgttgtcacaatcctcttgatgccagaagttcaaagaatagcatttgatgcagttttgagcaacgagtttgctgacgatgttgtattattgggtaaactcagaagaattgtcaaggttccattcttggtcaagtgtggcaagctcctctgggctcttcccaatatgttggcctttccttatattatcgccaaggcaattttgcttatgtttgttggtagtatcccttttgtagggactatcattgtggttttgatccaagcaccatcgaaagggctacaggcacacgcaaggtattttgtgcttaagggattcgacaaacgacaaataagagctatctacagaggcaacactggtgcctatatgggatttgggatagctgcaactctacttgaacaaatccctttcttaagtatcttcttcatgttcaccaacaccatcggaggtgctctctgggttgtcaatattgaacaaaagcgaaagaaagagacgcaagagctcaaggaaaaagaaaatgcagaacagattttacaataaataaaatagtcaatcaaaaaaatcatgaattaaggtctatctatctctaaccatctatccaattgctgaagttattaatacaaatatacattgtctacgcagccgaaaccagcggcaactccaccctcattactggaactgaatttggatctcaacaaccaaccggaggtcttgttggtcaaaaccttgcccgaatcttcattgtacacaatggttccaaacactcccaactcagaaatgatatcttcattgtatatctcatgatttctaataattttgttgctatgcttgggaggattgataatctccatcaagatatatgccccccactcctcttcgctgatgctgttcaaaaagccaggaatattctctttgtagatgttatttccaccaccttctctttgtggcttcaaaacaaacttttctggttgttcaaatgccaactttttggccaactttccttcttctgaattgtccaaaggataaatggctacaaacgtagacaagatgttcttcaaatcagaatcagaaatgtccggcaagaacttcttgatcttatcctcctttgttaatatttgttgaatcttctttgcacctgctaattgtgtcaagacagaaggacacttgactgcctgagacttctcaagaaataatcgagcggcccaagtcttttccgggttcacttcataatctgatggagaataaccagaacgatagtaaacaaccgagacttcgtccatagtagaccttatgtacaacttgttattgttgacggttgttctggattcaacatcttccaatgttactctgtaagtcttgatgccatggttcttaagcaaagagtattcaatgtgtctttggtcaaagcagtttctttcccctggttgtaccactgccaaaacaactgttttcgtgttcttggtttcatcattgtagtagaagtttgcatctgccaaaccatcggccaattcgttgatggaattggaaactggtatttcctcatcatcatagtacttgtacgaataacttttgtcgtagtaaccggcttgattcaagtagttgtgcaattcgcctaccttcgtggacaaaccaccaaatgaaacactgacggtgttgaactcgatttgtttgatttcattagtactctcgtggaccatataatctgatctgaacaatcccacagagataggttgtaccaacttgttattggggctctcagcgacagcctttttgtacacttcaaacaacttaccagtgaaatcagcgtcaaaatttgataaactttccaaggtgtctacaagccactctttttgatggattactaagttaatgtacaactcattgaagagctgttggacatcctgggcagttttgaaactggatttaggtaagggtgtaggaaacaaagtgatgggagcattgttggccgaaaagtcgtcaaagttgggaggatacatgactaagccgttggctaaaccccattgcaataaggcttctctcaattcagatgtctgttgtaccgataaaacggggaattccttgcgagacatggccaattgtttcaatatttatgggagattagcagaaatcacaattagggctaataagacacacaattggcacaatttccttgtgaaagctacgttgatggtggtttctggaaactccagaattgtcttattaatctaatcaatgaattgtcgattatcacgtgacctcaataattgttagtccggggtagaagggtgaattcacaagatgaaaggaacaagtctaccagttaacaagagttgtcaagttggaacatctctctatatccattttgaaacagatagaaatgttaataagagagatttcatgattgaagacggcttaatttggaattaccaaattgatttgtttgcaacacacacaactctttccctaatagagacaagtttattattacaaatcaattaagagttcaatgctattataccagctaattatgacttgctttgggggttccaagagaggtaaccatatttgcaactgatatgattgtaatgttcatcacgtgaaattgaatattgaaagggcaccagccctacattgaacattatgtgcactccaccgagaactttttttcatcaatacccactgaagtgaaaaatggctagtgacattaactaccaactggctcctctacccctacacagtaattatacaaaaagtacgttgaaacgggccaaaacagtgtgaaatgaaccagaaacacacgagataatagataccaatgaatgtaaaaaagagacatttcgaaatgggttcaaagacagcctgaaaatttatgattagtgggaatcagaattgaatgtacttaaagatagagaatcgtgtccaataaatgtagagttcaactattcacagatagcctagatcgttaacgacgattttcaagtccatattcattttgaaaagatacaactatttcaggtagagtgtctactctatgaatgttttatgaattttaatcgaatattgatacagcacatccataaggtcacagcatagaatcctacgctatccgaatttgcaagatttattggtatcattgtagaagtcgtgaaggatctagataagctcaagcatgatatcccagatttgtcctattatctattatctatctttttagattacgaatgcctactaacatctttagtgaaatacttagctgcttacttattgttggttaacgccggtaacgccacaccatctgccgctgacatcaaggctgtcttgtctgccgccgatgtcgaagtcgaagaagaaaaggttgaaaagttgatcgctgaagttgaaggcaagactgctgaagaattgatcgctgaaggtaacgaaaagttgtcttctgtcccaaccggtgctgccgctggtgcttctgctggtgccgcttcctctggtgccgttgccgaagaagctgctgaagaagccgctgaagaagaaaaggaagaatccgacgacgacatgggtttcggtttgttcgattagagaaacaatatgcttcttttacgtcattacatcctccttaatatatattagttttacgtccaacgtcaaatgattgtataataatagaatacttcattaatttcttcaggtagttcagcgtacctaactaagtactctttttagtcctaagtctataattcatcggctatagccttacgcaagcctagaggattgccaaagacgacatgtctagcgtggagcatcttttcatcgtagtctttttcttgttgagggtagtcttctctcttcttgtagctctttctggtttcgacctcagttgctagccacttcaagaaatcagacgtaggcttcaattctttattgcgctcatggagggttaccaagttgtcaaaatatgttctgaattgaattggtgaagttatctcgttgctggacaaagactcttgcaaaaaacgagagatttggagatcagcattgttgaactcttctacggctcttctatcgaaatcatcacgagacaagagattcaaatcttctagtatatttacacaacgttcacgagaatccgggcccaattgcggatacactgatatcaagttgcttatgccgtggtttttgttatgagaaaagtactcataggcaaaatgactattctgagctagaccctggataattcccaagattcgtttctggataacatctttctgagtagacaagttcgagaacaaagcggccacaaatgatccatccaggttgcgtaagaggttcgtgaccgaatcgggattgttacgcaaggaggcacccatgattcggtagactttctctgtaatttcgtcgtctttgtgggactggcctatctcaagcaaactgtcaaaaatgtctctggaagctgtcaactttacaccaaactcgatatcgtgactcaagtcgatcaatgtatctaaagcttgtgaaagacggctattgtcacccgagaatgaaatgatttctgctactgctgaatcaaaacttgtcaaatcgtcatggtttactttgtgggaactgtgaatattgtgattgtgaatctggtcgtgactctgatcctgataaggttccgcctgtttttggagcttctgctgtctgaactcgttgatctttctctggatctcgtcctgagccaagtcttccggaacgtcgtgcacttcttctcctggcactagtactatgccagaatcagaatcactatttgcttgttccggttccattaatttagcttctctctgtagtgtgtcgatattcaaacgaacatgtaatccggcgggaatgtcctggccctctcggatgttttgccactccgatgtaggcacaaagatccgtgggtagcaatcggtgggattttggggagaacagatgaggtctgtttcggtgtcaacgatggaagcggctgcagcggcaataaacaacaaccactgtatcttcatgaggaagtgagattgatagaaggatgaaaatcagaaacaaaaggcgatatgataagatagaattgcatgaaaaatgaaattcgtgaaatcaagttgcaaccgcagtttgagtcgagaagaaatctccacgtcacatcctgcagataaaacggattgcttcattacagaagtatgtagaagtctgtggaagcatttggaggtatgaattcgccatcgaagctggtggtaagggaaagtttgctgttggagttgtaggcagttaacttcaagattgcaataagcttattcaggagaataaattgtctaaagattgcgaattgaagtaagcaaaaagaatcgagtgagcagagcacagaagaacagagaaatagactattcctggtttgaaagggtttctagattaatagtgattccttagaaagatacaaccattatatttattgtatatataggctaatgtctctcataacgactgcaatacaacattgaacaccagttaccaaaactcttccatatccacctactggacttccctgcaggagtactcaattgggaaaggttccagattccaaacacatctggaataaatgggataaggctttgtgactaaagcgaacgactaatggaaaacgacaagatccccacagtatcttcagaggggctgttctatggaaagaaacttttcttcctgcatttctcggctcatctactctagcagcttccctttcacatttacgaatggctgcgaatggctgcgaaattctacaatactgtttaaattcaaaatgcatgttcatttatattgtacaaattcgacacccaactctatgaactaggcagtggctacagccaaagcctgttggatgtcggccaacaagtcgtcggtttcttcaataccgacagaaagtctgatcaagtcatcgtagacaccgttagcttctctttcagcctttggaatgcctccgtgggtcataatggcaggaacctcaatcaaggactcgataccacccaaagactcggccaaggtgaacaacttggtggacgaggtgaatacggcagcagccttggcaccaccctcgattctgaaagagatcataccacctcccaagccgtctctgtgctggtgcaatacgacttcgtggttcttgtgagacttcaagcctgggtagttgaccttgacgacaccggatgacttcgacaagaactcggcgatcttctgggcagaggtagcagcctgtctgactctcaagtgcaatgtcttcaaacctctgtgggccaaccacgagtcgaaaggcgatggaatcgaaccaatggcgttttgcaagaatctgaacttttcgtgtaactcatcggagttggtagccaaaacacccatgacgacgtcagagtgaccattgatgtacttggttacagagtggacaacaacatcagcaccgtgaaccaatgggttcgagatgtatggcgacaagaaggtgttatcgacaacaagcaagatcttgttgcctgtcttttgctcgtgagcagccaagatctgggaaatcttggagatgtcagtgacagacaaagttgggttagatggagtttccaaccagaccaacttagtgttgtctctgatagatgcttccaagtcagcagccaagtcgccgacaaaggtggcctcaactccgtgagtgttggcgaccttggtgaagtatctgtgggtaccaccgtagacatcaccaccagagatgatgtgcgagttgattggcaatgattggatgatcaaggcagtggcagccgaaccggaaccaagagcaatggcgtacttggctctttccaaggcagcgacagcgatttcgaagttgtctctgttggggttggaggatctcgagtattcgtagatacccaaaggctttgctggctcagactgggcaaaggtggtagacaacgagatgggctcgatgacggcaccggtagtggaatcgataggggcaccggagtggatagccttggtgccgaagccgaattgtggaacagattcgattgtcatttttggtgcagaaaaggggaggaaagatgaatgtgaatagtgaattcagattcgtcaggaaaaggttggacttttcagaaataagaggttggactcagggaaaatagaagaaacagaagatgcttggaaaacaaaactttttcagtaaaacgatatgagatctctatcctggaattctcaattcttatatagttggccctcctcatctgatggcattcttggtatgccatagagccatttgtcatagtagttaaaacgacacacaagttgaaaaaaaattctgcagcctgcacacagactgtggtcaacctgcactcgatttgtcagacgccacagtatgatgatgagccgtttctttttcctggacctggacgataactcccgtggccgaaatgggaaactgagtgctatgtgccggaatcatgacaaaactacgaaccacactatggtgcaattgcacgtgaaagtcacgtgacatacgcgcctctacaaccaggatttctcagcaacgacattgctttgctcggcctcgagcctcagtggagatgagatcgaggatgagggatcgaggaagagatttgcatcatgtgacactgtgcatgtgatgtgtacggcaatctcaggaaaaattatttgctccacgacgcatggtgccccactattagccccaccacttttcgcaactatattcagggtattacggtacgaatggagcaaagctctgaatcattgttctttgggcgacatttctatggagttaggcagtctagaattttctcagtgtatgaagcggcaactcaatatcaaaagagtggaatacagagtataggacagtatggatgccattcaattagcttactggcttttattggtactgatttcattagaggttcttgttctatggaattctatggtattatagggtattcttacatagttcaagctatgtacgagtcactcctggatgttacttgagtggctaggagaatttgataaggttcacaccttgaatatccctgggtatgtggccgtctagatgccgaaaaatgtattgttctgtgacgaatatccaagctcttagcatcatgagtccacacgaaaatttaaaacaatgaaatttaaacaggggagtaaataatcactgatagatagataccaatgtggaaatcgggttctgatacggtaactgatccaattgtacctgaaattaccgttcaatcaaagtctaagtagattactaactattcaattccatgggtaatatccagttagccgaatgttctggccattgaatgagtcaaagatactagaaaatacctcaaaacaatatgttattggttatatataaatccaatttgtattccgaaagaggaaggtgccatggataaactgcgctataattccattgtctatgcacattagcaggtaccaacaatccccatagtacaatggctcggctatgataaaaacagaccttaccagttagttctatccaatgtcctaattgatggagcctacagtcttcacatgagcaaatgcaaacggagggcagcttctgccacagaatggatagcggcaccacatgggcaatgcatgatattatcgtaagtacccaacacacctataattggcaaatggaatccaggaactatccataaagagtataggaatctaatgagactcaatgaagggagagttggagatgttcagctatttctttagaaaataatacaatatcaatctcagtactaagacctcaaaataacaacgtatcattaacaacgtatcttttttgggacattccacttccaagtaattgcttcttgtccctgcaaattcaagcaggtacactgaattcttgcatgaattgaaatttcggtccaacttcaagtaacattaccccttacctttccattgtttaacgtacatagctgtatactagcacatgaggcatcagaccatggaataaccaaacctccagtagaaagacataaatagagatgacctttcctctgaataaagacagacaatggataatatagtactatagcattgaaaattagaatgagattctctaccttcacaattttggtagcccttgtttttggtgttgctgcaacaccaatcaaggttgacaacgatgaagtgctcgcagaacgtaacttgaagtatttcaaatttccaaagtttaaaccatcttcatatactaacaagagtcatgtggaaattattatcaacaaacgtgaagctcctcttaaaccactagccaccaagactgatccatcacatatcaaccttcattaccaacactacctaaatgaattcgatgatcttcagcaagcggtggtctttgcaaagtccgtgtctagcgacatccggatggccctagccacccccacatacaatgctaagatgttgttacgctccatctaccagaatgtacctgaaccaacagaaaattacttcaatgaaataatcgaagaccagaagaacgctcgtcccatagtggactcgctcttgggtgggattatagaacctttcttgcagcactagaatttgttcctttttgtagacagagaccgatatacgtgacatatacaagtatgatcgtgagttattatagcaataaatacacacaagttgatgttcaagaatacactctagctttaaatatcaagtcaagattcacctcaatatcaattctacttattcaatgtgcagttgtccaactttctattctcataccctgtatacctttcttactttctgtttccgtgatgatcattgcaaaacgctaattctgaagtgtatccaagaagttgggattggttgctagtttctgtttaaatttatcccaccatgagtcaaatgctttcattggaacctttcccgcattgtcaatgaaactacccaagtagttatatgcgtgtcctacgattttatttgccaaagcagctgttgattctggttgctgcagactctcaggaagatgtggcaccaaagctgatgaagtcttcattttttcctgagctataagctgttctgcttgagcagttgtttcgattgagattccaatattaatagtagtagtgtcattcacatcagcagtagaatcttcgatattcatatccatatcatcattttggatcagtttctgagcttttgcatttgtattattaagtctatatatagccagtggctttgctgggtttaatcctccgagtagtttatactcctgtgagtcgggcaactgaaaataaaccaatgccgtgtagtttacatctgtgaatgctgagttgggcaatagaaagatggctataaacgagagccctgaggcctgtgggatgctaattacgtatttgttggcttcgacctggtttgccaattgaatgggtcttcctgaacacacggctccgaacatagtgacagtatctgagctccaatgggttctgctggtggtagaaatcgagattgtgtagaaaagagagtatctccaaaccgatttagacttcatataccttccccatagttaattgcaagatgagtgttacccggccgctgaatctgacctctgcattttttcagtgaaaatttcacgaaatattatgttaaacatacgttgttcttcttcatgattagccagtagattctggattacgattctacaatcatatctactagatctagtgtagattttaggaatattggagacccatttcatgggcccttctgagattttccaagtttttcacttttcagtccatgattcaatctccattcttaagatttattattactcattgtaatattaatctacaacagctagtggattctctaagataatcaacgcaccagtcatcaattccttgtacaaaggtttgtgcatagagtcgatgtctggcacgttgccaaaccattttggatggtcaaagaagatagtcaataaacgctggagacaagctttctacacgtattctttttgtgtttgcgtctagaatccgtcttttctcgagtccatgtcttgattatcgatacaaccgtcctagagcagctacgtcgaacatattttccatctttgagcatatctgaagtccttcattttcgtgcaatagatgaatatgggaaagatacttcgtgacatttctctataaatatctatgtctctgtagtacaaccaactgtctccaccacgagccagctcgtagcacatcctccccagatggacctgattctcgctgtattgttgtacacaacattcaagtagtcaaatgtcacatcttctgcctcttgctttttctgaactccacaattgccatgctctccccatccccacgagtagaccttattgtcattgcctagtatgagaccatgttcacttcctacggtgaatgcttcgatagaaatatctgaattcacaggatacaattggccatggctattgtttccataagaacgtactacgagttggccactttctgaggctttaactagcaaatgcacagatgaccacatggttcttatctgaacaagaatttcagtccctgaatccaagggagtttctacctgtagttttccaaacgtttgtatactatttttgcttcctatagctgtgaactctcttccaacatcgaaatatgaagcatctttcgctatttctccgaattctaatcttcttggtttccatataacaccctcaggtttcccattgactacttctgtagttcctagttgaccttttctggaatttccccagccgatccaactattctccaacttgatcactgtatgattgagcgacgatttgacctctaccttcgcaaggtcttcatcggtaggaatagaaaacgataatttcgttagctttgagcgccgtaaagcctttcctaagcccaattcgcccttatttcccaatccgcagacgaatatctctccttttctgttgatcaaagtggagttctcccaaccacatgcgatattgacccagtccgaaccatcaatcttggtgaaaaaaggaatactatcagacggatcatgtccacactgtccgtacacattctctccacaactgtagacatccccgttttgcaatagcactaaagtatggtttcctccacaggaaattttgcttggttttatgggtagtattgaagtttgaactccgtcaagaacgaatacacactcgaccaatgtattctggtccgtgtcattgcctgtgcctagttggtaactcccattggatccacaagctagaagcttatatttggccattagtatactgagccattagtttgggtgcaaaaaagtgtcggatctgaaatgtcaacgcatacaagcagacagtaaactcagacatctgggtatagaccctactgtggaattttggcacgcgacacgcgacattttcctggttaaggaggcgccggaaaaacggtagcttacatattattgcaaaaagaactggaaactcatagcgtgccgactatgtttggtcatttctatttccaagcaggattattaatgaatggccacgaacttgatgtctcgagacgacaataacgccaggctccgtgaccgtccacaatgtgaactcctattatagcatcgacattttagccagaaaaggaaaattgctgtcatcagattgtcagtttttgtcccgtcttttctaaagactcgcgacctgctagtcccgtctaactttagattcttccacaatggtctatcttatccgactcgcaaatggagccagttatcgtctggcatctatattcaaactgtggcgtccgtgccgaaccgagctatatgccggcgtgctgcaacttctctattaagatactgtggctgcgaaacttgattgcaccattatcgtctggagaatagcaatggggataggcggctgttaacagcggccaggctggggaaactttagcagagatcttatatatatcaatatcggcccataagtggtacgactcgggtcgaccagatcttgctctaacttcgtacttataaattgcacattttccgcgtcttcaattattgatttagatcagctttacagacctccggttctcaaaacttgaactcatattccagaactgttcattgatagttcagtctaatagttcattgcaatatttcttcttgcctccacttgtctattcacgaatagctctacattcataatggctcccgttgctgctgctactagatacgacccctcgcagttcaaccctgaacataatgccacaacggaatctgggtcttataccatcagcaaggacaatagggctattgccaaattccctgattttgttccaacctggaaccccaaccagaagttcccacctttgaagttcttcaaacataccgacaaaggaacattggctgatccagaattaaggaacttgttcccagccaatggtacccataaagtcaagaaggttactcccaagcttggctccgaagtccatggaattcagttgtctcaacttgatgataagggcaaaaacgacttggctctctttttagcccagagaggtgttgctattttcagagaccaagacttcagcagttatggtcctgaatttgctgtagaatacggcaagtactttggtccattgcatgttcatcctacctcggggtctccagaagggtttcctcagttgcatattacgttcagaggcgcctctcagaatgaattggacagtgccttcgagactagaacgaacaacattggctggcattctgacgtttcatacgagctcaaccctcctcaaataacatttttcagcgttcttgagggacctgaatctgggggtgataccattttcgccgacactcaagaagcgtataagagattgagcccaaccatgcaaaagatgttggaaggtttacacgttttgcatacttctgaagatcaagcccatatcaaccaggctgcaggtggaatctgtagaagagctcctgtttctaacatacaccctcttgtaagacaacacccggtgacaaaagaaaaattcttgtttttgaatagggagttcggtagaagaattgtagagttgaaagaggaagaatcagagaatttgcttgaattcttgttcaaccatgttgagctggctcacgacttgcaactcagagccaactgggaacctaacacggtggttttatgggacaacagaagaactgtccactcagccattatcgattgggatactccagtgttaagacacgcatttagaatcagtccccaaggagaaaggcccgtggaagacttgaaggatttgaataatgagagttatttaaaagaaaagtactccgttattaagagaggttaaaagtattgttattttaatgttaatgttagtccatgttgtaattgtagttgtgcagtaagtaagataatgatacccaattggggtatttatcagagcaagttagagttcacaaacggaagtatatgtatgtgaagtttacaaaaagtacataaacaaattgatttgaaaagtcgtcaagtttctaaaatgaattgtaagttcaatatagttaagatctctcagtattttcaaaggttttcctcccttcatttagatttttagggaagtcaaacgattgcaaaatccagaggttagttccggagccacagacacgaacttagccgtgcgtgcaggcgaggaaaagacgcgactcaaagtgcgctccatagttaagcagagtgaaaaagttgttccgatctgatgagaagacccgatttcattcactacattcagcacagaagatttcagaaaggcagaagttagcttgttgaaaaatcgtctgcttcattaatagtcacatgagctggtacaagaaagatcggcctggaatcaggcccgagaccgagaaaactcccaaaaaggaaaattatgtccaagttccactgtcttcgccgattcagatcaagtcgtcaccacaacagccttcacttctaccaccatctcttaatagcaaatatctgttaagcgaaaaagaacgccagctagaaactaagagacaggctatcagacagcacaaagatttttctgtcgttcgcaaacgtttctactatctcaaagagagtgatattttcaaaggctttgtcaagggcaagggaaatctccgtgaaatcacccaatggcttactgacaattacaacaaagccgaaatcctaggaaaggaagaagaggaacgtagacggcagcgcgatgaagcggaaagagtgaaacagaaacagttagaagaccgtatgaagcatgaatatgagaaacgcgaagagcgtattagactccagcaacaaatgaaaaccgacaccgatagccgcgtagttgatttacaagacggcacacacaaaaacagcttcagagattcaaatggaaatgttcgtagtgtcaaagttggaatctcagatgatgatgacgacgtcgaagaagttgatgatgtagacgacgaagacgaagacgatgacgaagattctttgcccataaaaatgcgtggaagagtcggaataaagcgggaggaccgatctcctacaaaggatgcgattcgtcacacattcagctcccaggaacacagcaccaaagttgtcagcagtaaacccagggtttccatcttggataaatacaagttcaagtccaagagccagcctacactcgaccacttcagaggagccctggatctccagcccaagagacgtaaacttgtcagagcctcagctttggaagacgattctgcctcttcttcagccacaggctcaccaatgtctgctccaaactcgctagctgcgtcgtttgcctatcagtcagacagcgtacccaaaatgaaaaagacaatactagcagacaatgacgatgatttgagcgatatgattgtagcagacgatgacttggagcgtttagaagaaaagatcaaacagaacatcaaagccaagcgagctcagaagaacgaaatcgtcactgtcagtgacgacgaacttgaagaagatgatatcagtgacgacatgtcagaagaagacgacgaaaacaactaccaaactggtattacttctattgataaccagatcttggagttcttgaatgatgcacctgtggacgatttgattgaaatctgtactctcgagccggaagttgcaaagttcgtcatcctgcaaagaccattcaacacgatatacgatgtttctgaaaataattttgaaccagaagacgaagctaaggctaagaacagcagcagaagaagaaagactctaggcttgagaatcatagaaagcaccgagttttccttaaagggctacaaggctgtagattcgctcatcaaaacctgttccaagtacggtacttcaatctctaaccaaattaatacttggggtgttactactaccggacagggtgagttatctgttactgatatagaccctgctgatgatgaggtgaaggaaattatagatttagacgaagagaacgatgacgacgaagaagaggtagttgtgacccattacaagaagaagggattgagatacatcaagcacaagccagcattgttggccgacgaaattacgttgaacaattaccaacaagtgggcatcaattggctcaatttattataccaaaacaggttgtcttgtatattggcagatgagatgggtttgggtaaaacatgccaggttattgcctttatggctcatttaaagcagaccgaagaaaagaagggtcctcatttggttgtcgttccagcttctacgcttgagaactggttaagagaattcaataagttctgtcccgacttgaaggtacaagcttactatggtacagtcaaggaacgtgaagatttaagatacgaacttagagaaatcgactttgacgtcttggtgactacatatacgttagcagccggttctccgttggatttcaaattcttgaggagtcagaatttcaacatcattgtatacgatgaaggtcacttcttgaagaattcaggaactgaaaggtacaacagattgatgaaattgcaagccaagttcagattgttattgactggtacacccttgcagaataacttgaaggagttggtctccttgttgtctttcatgttgccaaaattgttcaacgaaaagaaagaagacttacaaggtttgttcaaccagaagatgggtaaagttacttcgtcatcaaagtcagacaactacaatcccttactctcgattcaagccatcagaaaggcaaagacaatgatgactccgtttgtcttaagacgtagaaaggaccaggttcttcaacacttgccagccaagtgccatgagatagtgaagtgtgacttgtccaaggaccaaagaagtatttacgatgaactttacaataaagctaagtccaccagatcagaaagggagagaagaaaacttcttagttccaaggagcaggtagaattaaacaagaagcaaccgattgagtcttcttccaacgtattgatggcattaagaaaggcttctttgcatcctcttttgttcagaatccagtatactgacgagaaactagccaaaatggccaaggctatcatgaatgagccagaatacgtggaagccaatcaaacatatatcttcgaggatatgcaagtcatgtcagactatgaactcaacaatctttgtgctaaattccctaagactatgtccccctataaattgaacgaagacgcctttctcaatagtggaaaagtattggaattgcaaaagacattgaagctaatcatcgagggccggcaagaaaaggtcttaattttctctttattcacccaggtgttggacatattggaaagagtcttgactcagttcaaatacaagttcgttagattggacggagccacttctgtcgaatcaagacaggatattattgacgaattctatgacgatgaaacaattccaattttccttttatctaccaaggccggtggatttgggattaacttgatcgccgccaacaatgtcattattttcgatcagtcattcaaccctcacgatgacaagcaagccgaggatcgttgccatagagtgggccaaaagaaggaggtcacagtgtacaagctcattgtcaacgatacagtcgaggaaaatatgttgaagttggccgagaacaagttgcagcttgaccaaaccattagtgccgaaggggccgaagaggctaagttcgaggagaaggcagcctctttgtttgaaaagttgctctttgaatagggaggcctttttacagaaacagtagcagaagaaaccaacagattatggtatttataaattacttaatgtaatatgcataaataatggtagtcactaggatgatatatttcgtagatccacatatatatataaatagaatagtatactatcgtacaaggcatttggagaaggtgtctatacaattttggctcgaagtgttgcagccattcagggcacattccgtcacgtgcacggttccggatttttcctcatcaacatccaggacctggctttataatcccgagacatcttctcttcagcaaagttcattctagaaaccaaccatgtttgcagttagaaaatctttggtaggcagagtattcagcagacccactgtggctacacaaaggttgggtttgtttttgaattctgcccgaaacttgtttattcagactgtagaaactcccaatgaactggctttgaagttcttaccttcgattaaactcttggaagaaaacgagacgatcgagtttcttagtgggcgtgaagcggccagatcacctctagctgtgaagctcttcagtattgacggcatcaagtcgatcatgttcggctctaacttcataactatcgaaaagaacagtaacgatttgcactggtcacttttgaaaccagagatcttctccattttgacagagtatttaactaatggaacaccgattcttatagatggcgagtcactttctaaagacatggaaatcaacgatgacgatgacgaagtagtatcaattatcaaggagttgattttcaccagaattagaccagccatccaggacgatggaggtgatattgagtttgtcagcttccgagaagaagacggtacggtattcttgagattgaaaggagcctgtagatcgtgcgattccagttcagtaaccttgaaaaacggaatcgagtccatgttgaagtactatattgaagaagttaaagccgtagagcaagtagatgaagaagacccagaagtagtagtagctggttctccagaggaggtcaagttcgaggctgcagccatcacaccaagagccagagatgagcctcctaatttgtaaatagcatatacatttatagagggaccaggacggctccttccggacataggacaggaaaacgtatgaaaggaacaaaaggaaaaaatacattgaattttgtaatcaagtgttcattttgaagtagattcttatttgataatattcattgaaataccaccatgatgttgaattttgtagagtagtattcccttattcttttaatacttttcttcgtaatcagttcattcttcagtaacttctgcctctatgcctatattctacatcctgttgcaaccataatgggtgcgaaaattttaaaaaaactcaacaaaatttgctctattaacacatttaatatatacaagaagtgtcattcaatcgtctagaataaagaaaagagtgtaagctagtagcggcgctgaagaatcgatctcagtgattttttccgtcgtacgagtcctcgtagcggtatccctggtacgtccgatgctcatatgaatagtagctttctcctgagtgttcgttagaacgagaccgttcctttctacgattactgttgctattaatgttgccgctaggatatgaagaataagcactgtgcggatacagtgctgcaacctgaggtgcataatagtaggggttgtagtacggaacctgaggaaccatcacgtatggagcatagactggaactacatgtttatgactcccacgtccctcaggaggaatagggatggattggggaatagaaatattatgcaatgagataggactatgactgggcattattggaatttgtgcagggtaacttggtgattttccatgggatttctggatggcaaatgaagacagaatcaaaataggatgtgatgtgccattcatattcactaatttattgttggtcaataagatagccctagtcgccatttgaaacgattcatagaagacaaacccaatcctgccactcttacaggatttaccttcattatcaatcgagtaatattctggcttgataattttggcagacttgatctttccaaattgttcccagaatagttcccaaagggtgtcatcattgttaaataccacaggaaggttattaacatatatgttagtctcctggaaattgttctgcttggtgtattgattgataattaatactggattaggataactgatggcaacattattttctgcactccatgataaatagaagttgtttgcgttgttgtacaaataatggttatgtttatgttgtgctatggtgaccttaacagcgttagtatccagctgtccgttatcttcaggcctatcgtcggacgacaataacggttttaatgctgctgtatcgagttcattaaattcgtcccaggtcaaattgttaagatagtaaagaatacgtaaagtattttccattaagttctgagacgacttaaattgaacgtaaccataatccaagcactttaagggcgtgggagaattttcttgcaactctaccggctgatgacttctagaactcgtgcccactattggaaaatagatagactcgatgtcattgccgaattccttgaattttcctacgaattgataaaagtccaagctggtcaagtctttgggaaaaaaagcctgtaagttttcaatagtaatggtatcgaaattttcagccagtttatggtcgccagacgtagtgtagatggcactagtagaagttggcgatgatgaagcaagtggagcaccgttggaaggaggtgcggtgtaccgttctctcttattcaaatatctattgaagaacaaaggaatagtagaatttgtattgaatgcattgggggtagacttgtgcaacttttctatcaagacgtcaacatcgagataattgtcaaatttaactatggcgaaagcactgctagaattttcgttgcggaacaatttcacttccttcaagctcttgaaataactttccttttgtaagaagtcgaacaaagaatcgggggaatattcctcgtgcgtaatggttactgttgagtctacggcattatcaaataccaattcgctcgacaaattcttgatgaacaagatacccgggtgagagatgaattttgagtagtcaaaggaaaagtcgtagttcaattcgtgcaatctataaactaaggcgtcgacagcagaccgcttacagttcaataatgagacttgtacatgcttggtagggttgctacgtacggtgtgagtcaagtttcccacttcctcgattgtttccaccaattgggcgaaattgtcatcattatgggccaccgttattatgagtgggaaattgcaaaagttgatgttagtattggcggagttgaacaagcattcgttaagagctccgatcaacccaccatgagcggcgtttgttgacattctcgataaggtagtaggtgagggtgacaggaacgaggaggctggactggaaatagtggaggcagaaggggaaacactcataattttcaaaggaaacaaatagccgccgtggaaagtagttgtaatttgttccaactattattttgctagcaacgaattattgcaaattcaaacaccgtgaaaaatcgagacgaccggaattattgaaaatgccgatttcaccgtctgtagcggtatactctgggaactgtgaagtgaaagatgaaagccaactttaaaatgccagcaaaaaaattggaatgatgcgtcttcccaagtagcaatggcacggaacagttgtataattaaagataatccagagccgatcagaagttcagagaagaaactaaacacgaattagaccaaagactaatgtacagcagttcagtaataatattattattctaacaatagctgtagccgtgaaaaaaagaactggctcgatcagatcaaaaagaataattgcaaaattctacaacctaactggttagaacaaaatatgacgctacttcacagtatttatattcgaaccagggcctagcatatacgacctagccaggtcggatttacacattcactgacatactagcgcaagccaacctaagcaactttagccttagactgtataagtttattcgccgtgcaggagatgatttattcccgtgcctccgcattgaagaacgaaagtcacccggatgaagagaaacgagaaacgagaaacgaacaaggaactacttgctatacgacagtctacagagagaaatgatccaccgctcgcgagaagtcaacgtagacggcgtcgattgtgtagtggtagccagctatagccaatccgactcttccagaacacccgtcacggtgtatgttaacgagttgaataacgctgccatgggagactatgtctatgccattgggcagagccagacattcttgcaccatggcacaagctcagagtccggttcaggttctggctccattgagtcgcttaatttgctcctcaataaaaagctccagcgaccagtgtatctcaatgtgagcggtgccgctcaggtctccactgtcagcatgttccgagccatcgttgaggtcatagacaattaattggctctaaagagcaaatccctcgcgcgcaattcctagcatattatcgtgtatttgtcgtgatgaacagtgtataataataattttatgtaatgcaatattgccataatacatatgcagaaataaaataatggaattaaactctttttcaattattagaattattagcacgatgtgtttgctgctgatagcgctacagagatttcggcggctattctagcccaaacttctgttagagatctaagctgtctaatctgcaccaaaaatattgctgttggacatagaatcgctacagcggctattttcggcgggggactttttctcatattttcttccccttcagcaatctaaaataagaacttccaggagtgcaaataaaattaataaccatctccgtatagatggctccaggtgcgccgtccattaataatacggacggaggggtttgctttgttgaggcttgaatctcgaattagaggtcgtggtacatgcgggtcgatttcatctactcctataccacaattccgccctcctagcaattgccagatccgcaacaaaaacatgactggcactttacgacgagattggccagtttcacgtgaaatcctttgtcaatgggcccggtccttgactctaatgccgaaagtcctgactcactatggccatttcaaatgacctttgggctgcatgcaccactgggggtttgaattggcgatttagttgcaaatgttgacttttcgcgaacccagcagcttgccagaatatacgctgttttggtccaaggtcggttctggcagcaacgaaccggtttacacctgttctttgcatcctgtcatcgaacagccatcttaatatgcaccaagtcttttcatgcgttttttgctcgtctttagagcccgagaaaaaagacataatcagttggccattcaaagcccggcagcgcatactagcccaatattcgctattcttggaatcccccatgaaactacactatgtttctttatttgtgcctcattcatagtccatatcgtatattcaagatccatattgatcaacgtataaaatgtatctctaaacctcgagtgggccaaagtactctaacttgatgtcttcgacacccttagcccccaaataccccttaacgtacttcatgtattcacgaggtcccaataaatagacgtcgctgtccttggaaatctggtccaagtccctgctgtccaacgtacgagtctcaactgcatcgatgacatctttggcagtaacattcttctcattagagaaaaattcggtaagcttaaacttttctccatacttctccttcaattcctttaaccagttgccaaaaggtctagattcgacagttttgttagagtagagcatggtaacgtttcttcccagttgtaaagctttttccaagatagatacaatgggggtgattccaatacctcctacaagcaaaactatatccttttcagagggtacataaacaaattttccacaaggaggagctactttgagagagtctccaacctttaaagtgttgtggatgtaacccgagatcttaccaccttccaactttctaacagagatacggtactctttttcagaggggtactcagagatagaatattctctacttatttcttgctcttctcctggcaagctccacctgaagcaaagatattgacctctctttggcaaggaaatctcgtcgccttcatttgtaggcttgaaatatatcgacttaacgtcggtgcattcgtcttggattttagttacagtgaattctctgaaacctctccaaggggctttttgatattcggcgtcttccatgtcaatgagcaattgagccaagtttccgtacgcagttgcccatgcatcaataaaggcttcgttggcaacttctggtccaagcaactccttcatggtcttaatcaatgagttaccaacacaagggtagtgttcagcctttacctgtaaacctacatgcttgctaacaatctgcttcacaaacgcagtcaagggttccaagttctcgatgttcttggcgtagttcaacaaggcaaatgccaaaatacgaggctgtctcaagaacttctggtccgtctgattgaagaaaggcctgacttctgggaaatcgacaaacatgttctgatagaactgggcagtcaatgtttcaccagccagctccaaggtgggcaccgtatcaaggacgattttcttttgagagtcagtcaattcttgaatggtgtatatttgtggagcagtagacatcatagaggcagagtagcaacggtgtggttaagagacttagttgttttgtaacaaactgcaatgaatctctaattcaataacggttgcgaaaacttagtacctaatggaggtgaaacctccactatttatagtgtacgatcataaaataggaagctcccaaatgttacattttagtaaatatgaaccatatctacggaggtataccccagaattaaggcacgatcaagtgcaactccggtcatggaatttaattagtcgtgcttaaaatacttaataattagaaatcagttgatggcagactgccccaagtacagttcaacgttcgaactagagtcaagtctagaagagacgaaactcaactagtaaactacggcgctcaatagagccgcaaaattattagcagcgaggacgccgtttccaacttagcacaatagctacgatcgtatgatttcgcaacacgccagaaggtagaatttacgatgagaaataaaaatcactaaaatatgctgctggtctatgcaaactatgcaaaacagccaataccatccctgtcataggtaaacaattggttttaggaaagaaccggatcctttggtgaacaaatgctattgacaaaatgggagattcagggtgttgttccagtgactcaggctgcatagatggaaaatacaattaactttccacttctttccgacccgcttcagtataatatttgtagcatgaatactaaattacagttacaataaattgaactgaatttattaaagtagtattagagaataggaacgactattgggttttatagtgtcattaactattccgagctatataattaaaattaatatggaactaattacaagacggcgacagtagaattactgaacagaaagaatcttggtagatttcgctgaaatgttgaataatactaaaattactaaatttctatttctattttaatgccacatacacaatggtcattacgaaattgaatattcaattggcatttaattacacaattcctacatttttgaaaggggccagcatttcttacatttcgtagttacaagtccgatctgcatctgtgtctttacctgatagctctttttccgctctggccctatacaaaaatttctccgaaactaaaatcgtctcctagtatatacaatctccgacaactccgattgactccataccaaatgattcatttccggtgtgtttctattggataatcgacaatagatagatttggtgaatgtttttacaagcctcagattcagaagtcctcaatcttgaacaatactttgccgtcttcggtccgaagttgtttgatatgccctctgtagtcgttcctccagtcggaaaagtcgtcgatgcggaatttcaactggtcctctagtaataatcgtagaccttcttcaacccaatggtagtctatacgaagttctaactcttcaaaatagttgtagtttgtccagttgttgaataaattactggaccatttcgcagcccatggatttattacactagcttctgagtagtcaatcgcttggtcaattcggtaggttggttcggataaactgaatttgcacccagatacaaaggcagatcctgttttcttaggcttcaagagttttaccaaaaatggctcctttacacgagcgttgaacaactcttctaatggaacattggtatgctcccttaacggtaaatcgattttatcgagcttgctaaaccgtatactatcctggaagtacatcttggagcctacgagatctacaagaagatctaacttgtactggccaatattttccgcactgataggaggatctacaagtggtgtatgaggcttgaaaagtgcctctatcacctcactggcaaaataatctttcttcttgtagtttatcggcgtcttttcacctggaagcacaagatcctcgtttaccatgtcgtaagtcaaaatcgtgatatgtttaggtttcgtctcatcatagtaatggccaatagtgaactgtttgacgaaattgctcatgtacttgtagttgctatctctaactatcaagatcaaattcaacttgttgaaattgtacacgggcgagtttagaagctgaataaatgtaaaaccgaggtttgtgtctgcaccattgatcaagatattgccactgttgtgagcaaactttgtatgtgccaacatctgtttagcacgacagtacaagacagggaaagatgcgaatttggccaaagtggggatctcaggatcgatggtatatggcgatttcttcttttctctgaccagctttgttgctctggcagtagaagaaacagcacgcacagccgcttgatcatcaattgaatcatcagaggaggagtctacttcgaagctgttggtgtctgcatcgctattgtcgaacgacaactcgatgtttatgttcatagctctggccaaagcatcatcaccaagtttcacaagtatgtccctgctggggtttactactagactagtcgaaagggtcccctttctgtccaagggatctacaattcctactacggcgtcacctctggcaaaagtgccgttcagttcaattgccgaacccacatcggtgattattcccgcaaactcgtagcccaaaccaaccttggtattgctgaggttgagcaaataccggtttattttcgacaagtcaaatgagttcaatgaggcatactttatgtctactaggacttgattggctggtaacggcaagtcaattacaggatagttgaagttcaattctgtttccttattttgaacggagatgtccttgatgttaaaatagtgcaactttctgatatcgatatctgcaacagaggacgtcccagataaactagcagccttcttgggtctgtacgagggcaacgcttttggtgctggtgccttcttttcaagataagacaactctggtggaatcttgtggaatgggttggatttgagtttttcctgttccttttttttcaagtcctcgtggtgagacttgaggtcttcctctggaagtggagcaaaaccaacagatttcttcttcttgggagtctcttcggacattgcggacgggacgggaaaagagtataaagttggtgatgaggaaaatggggatctatagataaagatgaagtagatcgcagagggaaatatggagaaacggagttctgtacaggcagccgatgctgtgccgatttagccgtttggtgggagcagcatagaggaagagatcagggagaaaaagtgcactagcaagaaaaagtgaggctacggggaaaaaatgaactcagagtgagtttagggagaaattagtgcgctttgaaattggcactggtgagagagtaccagagtattacagacacagaactgagtccataaatagcccgtgaaatagcataactctaaaccatatcttcttcagattctatgtatcgttcaggtgtataccaccatatcccatcattcttttctcctggtgccactgttggctattgatggctagagttaagattaggctaccgcgactcctcgctagcttgtaccgtcaccacagttctcgctattcgcgctctcgctaaaacaaatataaacaataacaatgataattaaaccgaacaagattctttttatacacgttcgatctttttacgtacttctgcttttgatctacacagctcatctttatctatttatttatcttttgttgctaccgaagcgcacttccgaattcaacggtattcgccatctggtctgtttcacattgaactccctaatacagtctgatcactcagccttacacttctggatcttgccatcagaactcttgagcagacatttatcccatagtacaagctaccaggatcgtcagattcattaaaggataccttcacgcacattctagatcttcgctacttctcatatatttggactactacaatatatctgtacatctctctcttccatatcatttcatatcgattaccaattctcaatatcagtctttaattttttgatctgaatcaattttgtttgcaataatcgtcatgtgggtccttatagtactgtgctatctcattgcagtattagcctcaatagcgggaatacagttccacatcaatctgttcagatatcccttctatttcagcatccctctcgcattagccgtgcttataccgatatccatcacatttctacttccaattgattatgtttcgctgaattccaatggcagtttgctgtggttcgaattgccccacgatgtgatcttaaacctttggaaagggaactattggtcgactttcttgttgacttggttgcttctcccgattctccaggagttctaccgctctggccatcataacaagctatcaaaattgaaagatgcattgcggctgaatttgaagttccaggctgtgatgctagccgtttcagtaattggcttaatctaccttttgctagaagtaggcttatcttttggtcacttgaagctgatgatcatagcattgtcacacatctatgctttaattctagctctctggttgatggcacacggcttgattagtattccgcgtaaccgctggatcgaaggaaatgtagttcagagcttgaaccatgactacctcaagttgccacgtcttgtggacagtttggaagacgtcaagatctcgttcaaagaagaagtcctccaggttttggtgcttcagaagaatttcaccagtgaatcgcctgaggatttccagttccgcgattggatcttggagttatacgaccgaattcccgaagacttacgtgatttggttgaacgtcaatatatgcacgaaaactcaagcatatccagagaacaattgacgatccattttatgacaagattgacatcaaacttcaatctgaacttaaaccgtttggttggatatgaatcagaattcgatagtttgcttactaaaatcactcatttggaagatatcttgctggccaaatctaaccctaatcttgaagaaagaaacctcctcaacttcagaatcgataaccatagagttttgcttctgccacggttgaactttatatattggtactatgttcgtccagtttcaagccgtatattttctgtggtcttgtttgttgcatctttcgttattctccagtcggagttcttccattcgtccaaattttcgttgatgaatgttctcgtctattcgacgggaatcaacaatcacagtttgttacaattgctagtttcgtcgattaccttttcgtacatgttgtttgcctcacttaattcgcttacctcgttgaaggtcttcaacatgtaccatttggttcctcacaactctgatccggtttctgcctgtttctacacaacatacatagcaagattgactattccgttgtcgtacaacttcatctatctcttcaagtctagaacgtctgtgtttgaaacctggtacggtcaatccatccatttgactgggttgtttgacttaatgaacaactggattcctcgcttagtgttgcttcctgtggtgttgactgtgttccatgtgtatgacaagttgaagaagaaaatcggcttaaactccgacttatacgactcttgggcattgtttgacgacgatgagttagagggcaacagcaccaacgacattgaaaacttgaacaataaacgcaaagatgtcattatcgtcgaggctaaaaggatagttaatagagaaatggccaaacgacaactgcgtcgtagagatagttccaactctacaaacaacttgcgtacattcaacttgtctcaggctgcaaatactaactatgaaaacaacagacgcagtttccacgatactcttgtgaactcagcgttgggcaaccgtatcgacgctccatatcacgacgatatactggacacatctgcacagccaaccatgtggggtagacttggaggtacgttcagcggtatccgagagtcgttagccagattctcaggcaacaataacagcggtagcagtagtaatgtcagtgggttgtatagagacgagccacttgacgattttaactacgacgacgatgctgacgaaaatgttgtattgtaaaagaacatgcaatgaagtaacagtcgtatagatacaatttaatatactataattaatactaataactccaatatccaccaatatttctgaaaacgaacagctggaggagccgtatttcgagacctctcaaaatcaaggaaattcaaacccgctgctccagctgaaatatgagatatggccaatatcaaagcctgaatatacttgcgattccagaataggaaaggccgaatactaaagccctcaactatgaaattatggatccagttgtaagtggtggtgttgttctcgggcattatcaagatcatgagtcatctcgtaacttccagaagaacaaccgcctccattatcaatacaccattagtaagatattagaaatgtcttgctggaatgaaacaggttgatccagaaatcgcatcccatcgattgcaaaattttataatcaacaaaatctctgaacacacctccttggcaattccacaaatgtaaagactaaattcaatctatttttcgcttattaatcctatcaaggtaaaataccattgataactacgcttttggttaaacagcagctgtctctgtgagaaatctaagttattattccgaatcggcccatcgtttgcacattccggatttcgtttttccaaggagctgttagtccgacgctaagataacagttgttctgttctgtggtagataccttctcctcggtcttaatgtttatcttcaaagctgtattgtcccggttatctcgttcgctattattatatccatcctaataaggttaatccgtatgcaaaataatttgttgactaatttggaaagtccgcatgtatacattatatttcattgagtaactccgattgcaatctattcaactacatgaaatagtgaatggacgacgtagctctaacatagtagaaggacactggagttgctagtatttaaggctattggagcgaccattatgacacgagttgaaaagagaaaaacacaacaacttcactgagaggacaaaaaaaattaaccgaaatgtccaagtctacgtctaccactgttcctgccaagttctccggattcgctgtcgataagccagaaaactggaacaaagctaaattagtccagtatgatcccaagccttttaaaccttatgacataaccatcaaggttatctgctgtggtgtttgcggaagtgactgtcacactgtcttaggatcgtggggtcctttgaacagagacgatttggtagtgggacatgagattgtcggagaagttattgaaatcggttctgaagtaaccaatcataaactcggagacattgttgctgttggtgctcaatctgattcttgtggagaatgtgaactttgtgagaacaacaacgaacaatactgccgtgatggtattgctgctacttacaattttccaaacaagaggtgtggtggatatgtcactcaaggtggctatgcgtctcacttaagagtcaattcctattttgctgctagtgttcctaaaaatttggatgtacattatgctgctcctttactctgtggtgggttgactgtttactctccaattgtccgtcacggtggctatgacttgaaggataagagaattggaattgttggaattggaggtttgggctccatggcaattcaaatcgcaaacgcattgggagccaaggaagtagtcgccttttcaagaacttctgacaagaaagaagatgccctcaagttaggtgcttccaggataattgcaaccaaggaggatccagattggagtaagtccaatgcggcaactttcgacatcattcttaattgcgccagctttggaaagggagtcaacttcgactcattttttggagctttgaagcttggcggcaagtatgttaatgtttctgcacctcctctggatgaacttatcagtttaagtccaaggaatttgattttcggaggtttttcgattgttggctctgttattggttccatgaaggaagcaaatgagttgttgaaattgtacgccgataacaacttggctccatggatcgaaaaagtgccaataagtgaagaaggagtccatactgtgatgaatcgaatcaacgtcagtgatgtcaagtacagatttgtattgactgactacgacaaggccttcaacaactagttttatttcatagtcaatgaatgtttcaagtttatacaataaacgttcaaagtgtaagtttgtttgctaatagaaaaatcaagcatgaagttgatttatcaatgaaaatatatacatttagttaagtcattttcaaggataaactcttctatctcctctctaaaatgggtgcaaaagacttattgtacactggctctaataccgctacagaaaatctcacaggaagtacacctccatgcagttgcaacaaggcggatctccacattttttcgcacccaatcggaagcaaatgtcgtattccagtgcgacattgccccggcttatcttcaccaaagtggaatcagtttcaagctacttccactcttctgttttcttcaccaccaaaaggatcagtgttgctcgtgagacgcttgttttgctgtaacatcttagtatagcagtttccgagttcgggcaacgttccagctcctttttgcaactcaattgctgcaaattctggcatttcttgctggaggtgttttcagctggcatgacgacattgtttccatcttcatctagagttcaccttttgagctccagaaggatccaagagtcggtacgatgcgttctgtctaccatttcgttcacggctattgacagatcgctgtcaattcctctttctaaaactactccactcaaacttggccggcttcgagtgccactcatgaaaagtccatctcacttgggtcacttcactctgcgagtcaatcggctctataacgaagacaagtactcagcaaatgtacttctgcttccagacgacaagacagttttcaacttcaatatttttgacggccatggcggtgaccaatgtctgacgtaccttctgaacaacctttcgcagggaatcgaagatgccacaactttgctcaacgacgctgcaagtcgtgacaagttgatagagacttactggaaaaacatcggaggatactggaaacggtggtataaacatcgaaacgaaaatttcgaagtaatgaaggccttgtctaccaccgaagacttgataactttaccagatgccagcgacgatttgcatttacgtcttcctttggcatttctcaatacagactacaacttctttctacaagacgacaaccagtctggctcaacatgtactacggcattgattcaaacagtacattcggagcctggagcgttccaaccggtgtatgagaactatttcttcaatcgtaaaacaatctcgaagttgaccatagcacatgtgggagacaccagtgctatacttgtagaccgagacggtaaggctcatacgcttacccagtctcaccatccctccaaccctagtgaagcttccaggttgcgtaagtacgctgccaacttcttcatgaccgattcgtttggggaagaacggttcatagctttagctaataccagagcttttggggacatcaacttcaagcagatgggcgtaacggcagaaccagaagtgactgaatatataattggcgatgctcaaactattcagcaggagttgagccctgaacagatcaagactcacactgtaggagggatggggggcgacgagagttttctcattcttgtgacagacggagttaccgacgttttgactgatcaagaaatcgccgacatcgtcatggttcatttcaatttgaagggccacgatatagcatcaccacagatgggtgccgaggaagtaatcaaattcgtagagtacgttggaggcagtgacaacgcgacctgtttgataatacggttgaacggatggggtaaatggcctgtcatagaccgaacaggtgaactcagacaggaacggttgaacgacttcaatccacgcggaagaaactagagttgacataaatagtagttttgagtacattagagcaactagaccagggatatttattgtttgtatgaacaaggggtgaagcaagcttctactatttataggacgtgacgtaacgtaagatgagtaagttagatgaacagatttagactgaaagagcaacataaaagatataagataaaacaatccgctaattgaattgatatttggataaatgaagcaaaaacatagagcttgagaaacttctcaattatgaaagttgtgttatgagttgttcccattaagtgaattagctctagttagacattctttttaattctcctcaacttttatgatatagatatgatcattcagtcttattcttaatagtactttgattgactatcgatgcatcaattcttggtgtatttgtacatgaacttctttcttgtggcagcaaactcacccaatttggatcccaccatgttgtcggtcacttcgacttccacatactcttttccattgtgaatctggaatttcaagcctacaaactgaggaagaatagtacaacttctggcgttggttctgatgggtgttccgtttttgatagcttccgcgatgggcaaaggcaccacatgtggacccttccatacagatctcttcaagaccgttaaagcaggtctcattacggtatttatgctttagtggtggagtttttgtgattttcagccttcaacaagcgaaaaattcaatctaaaatttgtacttttcacttattttcactggaaaatcaaatcgaatatgagcacgtgatttatattcacgtgtataagatcacgattaaacttttctagatgagcttctcttccttaacttagagatttgtatatcttgaatttatggtaattattcgtttggtagctgaatcggcatgtttggagccagattcgatcccacggcgttagaagaacctactgttgtttctgtgacacagaggcgaaatctcgtacgaaaaagacggctcagtcagacttcgttaagcagcgatgagcatgatttgcaactgctgaagaacgaaatcgtcgaagatagtgactctctgagtgatgacctgagtgatgacctgagctcggacgaaagtgaagaagaaagtgaagaagaagaaaacgaaaacgaaaacgttgtgaacaatgacgtagccaaggatattgattctgtagaaagcgaagaaagtgaagattcggaccattccaatgatcctaatgatgctatggatgttgactcagaagtaaataccgaagtcgatgtggattatgtctccaaatacaaaagtgtttttgacaagttcaaaaagtctgttcctgagacgaagaaaatcgattctgagtccagttcggaagaagaagatgacgtagaaatgcaagatttgatgcctttaccacagccagcacttccccgagacaaacgattaatatcttccaattcacatcttaaaaacttagactggttagctactcccatctacgctagtcccgaagatagtaaaccatttagtgaattcgaaatttctccgtttcttctcaagaatcttgaacgagacaattttaccaccgcattttcggtccagatagccattatggatattctcttgcatgatatcaagcggaacagattggaaccagacgttaaaggagatattcttgtcaatgctgctactggttctggtaagactttggcgtatctgattcccattattgaagctttacataatcgtgttgtaccgcgagtacgagctatcgtcttggtccctacaaaaccgttaataaaccaagtcaaagcgacttttgtacagttatctagaggcaccaatctttctgttgtaagtcttagaaacgatgtctctatcaaggaagaagggattaaaattgtaaatagtcctccggacatcatagtgtctactccagggagattggtggagcatatttctaataagagcattaatcttaatagcttacaattcttggtgatagatgaagctgaccggttgttgaaccaatcgttccagaactggtgtcaagtattgatttccagcttagaaggcgatgtaaatattgctgaagagtggaaaatcactccgcaaaagttaattttctcagccactcttaccacggattctggtaagctctcggcgttgaaatttcagaagcctcgtcttgtaattgttaacgacagaaagcaactcgttaacgaaatatttaatgttccttcatctctttccgagtacaccatccagtttggtacagccaaggcgtctataaagccattgattttggccaagtacttgcttgagaacaataagttgtcgaacgtattgatttttaccaagtccaacgaagcttctatcagattgtgcaaattgttagagttgatgtttggcaagttgcacccaagcatgaacatagcctatatcaactctaccaacaataagagtgccatccgtacgaagatcttgaaggatttctcaacccagaagatcaacatcttggtagctacagatttgattgctcgtggtatagatattctatctattaccgatgtgatcaactacgacttgcccaactcatcccgtgagtatgttcatagagttgggcgtacagccagagccaaccagactggccatgcttacactttgtgtttcggtaagggagaagctaagtggttcaagaagattattctggatgtgggtcgtggtgacaagacaattgagaaggtagagattgagctcaaggagcttatcgttgcggaagatgaaaatgtatataacgaatgtttggaatccttgctgaagcaggtattccactagtgtataataatagacataacttatagagatgcaaatattgtcatggtaaaatagattctagaaatagagatgcaagcagaggaatcgttaccaatatagaaatagagccagagagagttcatgttctactggtgtagataaaaatgtagtggttcaacactgtggattgaaatgagcactttgatgtatgctgtactcgagaaatctatttgtaattctttctgtagaatgtctacatcttcttcacattcatacagctttcatatattcatgattgcttacatgtttttgctgacgtcgtctcttggatactactctaaaatagctctttactggaatgctcatctgcagaaaatagatgcgaaatatagaaatatcgaattattggaatcgattaataatctgatactactttcattcttttttcgcataattaatactatatccgtaggacagctctggatcatgacatgagtgagttcaaccgggaccttgaagctcttggagcaaagcttgtggatcaggacagtcttgagacttccatcacaagaagagccaatgaagcccttctttccaaagacgcggagttggaccagaaacgtttagaaaaagctacgaaggatttgaactcaactttaaaaagaatcagtattcttgaaagcagactaaataacccgagaacgaagttgagcgaacggcagaagctcagggatgaaatcaaatggtttgaacagaatgaattggtaccgcgaagacgcgatgtagaagatatcactgccaggctcgaagaaagcaagaaacagttggatggagctcaatctgctaaagaaggcaatactgtggaatcgaagaatgagaagcttccaggagaaacagaaaaagaattcttgatcagaactggaaagattactgcgtttggaaatatcaactctttccaacagattggtcaagaaacagaacaagtgaagagtcatgtatttttacgagctccagggtttgaggatacccagacaatgaaaattgagaaaaggaaagaagattttgatatggataacacagtagaacaggatagcatagatgaagatgaagaatcatacgatgataacggagcattacttgaagatcaggatcgtgaccaagattttcaggatacgcaagaagatttaggagaagattctgatggttctgtgtatgaagtcgaaaaagaagaagacagtaattctgattcggagacacctatagtcaaaacggaagaagacgatttaattgaaaataacaattacgattcagaagaacttaacgatgctgaagaggaactgtccactacgtatctccgaaatgttgatgatggagacgagcttgtctaccaacagagacttagacagtgggtttccagaagagccagtcttcgtggaactgaggtttcggattcaagcaagcaagagtggttcaaacctcatcccacgattcctgacgcagtgcttaacaaccaattcaaattacctggcgatatttacccgtccttatttgactatcaaaagacgtgtgttcaatggctctgggaattgtattcccaaaagacaggaggaattattggtgatgaaatgggattaggaaaaacgattcaggtaatttctttcgtagcaggtcttcactattctggactacttgacaaaccggtactcgttgtagtgcctgctacggtattgaaccagtgggttaacgagtttcacaggtggtggccacctttacgttgtatcatattacatagcataggctctgggatggggaagagtgctgttagatctgaagaaaaacttgaagagtttttggaaaatagtgatcctactcagtcaaagaactctttacgtggcatcaacagtcagataaatgcaaaggaaattgttgacagagttatggaaaagggacatgtcttggtgacaacttatgtcggcttgaggatatactccaaacatattcttccacgagaatggggatatgttgttttggatgaaggtcacaagattagaaacccagacctggatatttcattgacttgtaagcaaattaagacctacaacagaataattttgtctggaacgccaatccagaataacttgatagagttatggtcattgtttgattttgtctttcccggacgtttggggactttacctgtattccagcaacaattctctattcctataaatatgggagggtatgccaatgcttcgaacatacaagtacaaactgggtacaagtgtgctgttattcttcgtgatttgatttcgccgtatttgttgagaagactcaaaagcgatgtcgctcaggatttgcctaagaaaaatgagatggttttgttcgtgaaactaactcaagttcaacaggagctctatgaaaagtttttgcatagtgaggagttgagctctatattgaaaggcagacgaaatgtcttgatgggtgttgatatacttcgaaaaatatgtaatcatcctgatttggtaaatcgtgatatccttgaacataagaagaactataactatggaaatcctgttaagtcaggaaaaatgcaagttttgaagaacttgttgcaattatggcagagtcaggagcataagacgttgttgttttgccagaccagacagatgctcgatatcttagagaagtttgtagctaatctcagactcttggatatcgatcgtcctggtgaggaaaagccagatgaatattttacctatttgcgaatggacgggtcaactccaattgccaagagacaggatcttgtggataaattcaattctgatcctaacttacatgttttcttgttgacaactaaggtaggtggacttggtgtgaacttaactggggctgatagagttatcatttacgatcctgactggaatccgtctacagacatccaggctagagaaagagcatggcgtttgggccagaagaaagatattacgatctatcgattaatgactacagggtcgattgaagaaaagatatatcaccgacagatattcaagacattcctcaccaacaagattttgaaagatcccaagcagagaagattcttcaaagtcaacgatttgcacgacttgtttactttgggagatcaaaacgaggtcggaacagaaacaggagacatgttcaatggatctgaaacaaactttggaggcaacaagacgagagctccttccactttgctcaagaaaaagcacaagaacgacgacgatttctataaggttgctagtataactggagtttcaaagttggacaagtttcagggtgatgaggaagaagaggaagtgagcggagagtctcgtgatgagaacagaatcatggaaggcatctttgctaatagtggtgtacacagtgccttgaagcatgatgagattatcaattctagtaaccaagaaatgtctcttgttgaaaaagaagctagcaaagtagccaacgaagcagctctggcattgaagagatccagaaaactagccagaagaaatgaaattggcactcctacgtggacaggtaagtttggcttagctggtaggtttggccagaagaagaaaacagtatcaggtaggataaataaatctagtggctctggtgtgctatcgtcagagtcgattttaggagagttgaagcagaagaaagcagtcagagcttctgtgttcaccaaaaaatccaattccagtgaaaataatgaagctgtggataagaaggccacaatcgagaaattggttactttcttgcaatctcggccagattcgttcggaacgtcgctggtgatcttgaagaatgctggtgttgccatgaaagacgaaaacgacatgatccttattcgctcaatgctacgggagattgctgtatgggattctggtagaagtggatggaagttgaagaaagaattctctcagaatgaagaattgtaatgggtataattatagacgtattattaaacggggcgtaagaagctagaagtacagaagtgcaaagaaattcatatgaattctatattagtattctttttaagttccacaattgtaaattccttcaaaaatatctacgtagactgtagggagaggttctgagaagggatttacttttgatagtttcagatctttccaaagaactcacatatttgtgcctccgccattacttttcgcaactatttttcgcaactatactgcttcaggtccggaatatcggatcgcgatcggagcttttttcaatttctcaaatgggcctaacttttcatttgatttctactttttcttctagaagtatatagagaccccaaagatgacgttgcgtacgttctatagattggcatctaccgccagaaggatagtggcgacttctccagctcccgtttatgatacaggctgcacgttttgctcggttcctgagttgccatctgataagcagatcgatttccaagctaacttgaatggaaccaagattttaccctggaaacatgttttgatattgacccatggatttagtgatttttccactatgccctcaaagatcgaacttgtgcctggttcattgagctcagaaataaacctgttgaagaaacacataatcagccctcaccatcccatcttggtgctgaacatcttgttgaagtctcacaagaaagttctacaagaatatggaattgatgcagaaaaagaccctcggaaacagttggtatacttgtaccctgacaataaggtgatcaaatttgacttgaatcacactcaagattttgtacgaaagtatcttgttcctcaagccagcgagctagcaccagtgtacaatcctttcaaagttgcggccgaagaatcatctagtaaaaagacggaagagccagtagccggccataacttcgacgagttcacagttgataagaacttggtgcttatatgtggccacgcaaaaagagacattcgatgtggacagttggctccattgctagaaaacgaatttgagcaggttctacaccgtgagaatttgagcaaaataacagacttgggcctcatctctcatataggtggacatgcctacgccggcaacgtgatctacttccctaaagaaaacgacaaggacataatctggtatggaagagtgtttcctgaaacggtccagggcattgtgagtgagactattaagaagggcacaatcattgctgacttgtacagaggagttcttccccaaaactagacattcttgcatgttgtgcataaatgttgattcgatgatgtctttattaacctagtctaatcctaatactgctacactacagactgggctacactacagactgagcagctcttatgctgtacgtgcttaaagttccattctgaacaataggaacggcagtatcaactgacatcaagtatgtatgtatggaagccagtttcggaaaatatccctcgctaaagctttcctatgtcgccgcttcatgtgcattttgaggcagacattgacctaccgtccattggaatattgccgtttatgtttgcgaagaagtactagtgcgtgttggaagtaacgagtgaagccaaatctgatatcatgtcaagaaaatcttgttgaataaaccttcagataactccttcgccagcgacgtcatcgagctggcaaaaagataatcgaatagtgtcacatgagagcccgttggtgaatctgacttttctcttacatccggcaatgcatgggctcttccattagacgctttcttacatgattatggcctgctttccggtatgaactctcatgtgaagaagcatacggcggcattctacattgtacatgcaaagatttggaagaaaatactacaacaacgaagtttaaatccgatgcacatagccaacaaaaacgttctcaaattcatgcaatgaaacaaccagaaagaccttccatacaccgacacctatggtatgcggacatctttcttcattgggcaaaatcactggacggaccatcacatgtagatcgggaaattgactagtttgggcacaagtctggattatatctgaaatatgatacatacagtatttcccatccactttacgcacctcccttatcagaaatggtttagaacagtgcagaatcataaaatatttgacgcaaagacaaacctagaatattcgggcgatttatatactctccacgctaaagaatacaatctcctttttaaattttttgggtagaatttctaacacgaatctttctctctgactctaattagaatactatcagcagtgtacatgtttgcaatcttgcgtgattcttacaacatgatatggaatcgtttcgttcagattcaaatctgaaggcagtccttagagcatgatattggcacgaaatagcttcacggcggtctcgttagtgcgacttagactgaaaatagggtaggcgagatttagttgtgaaataaatatggcaggaaatctgtaaggattcaatatgcttaatgaatctttaacgaacacagcagtagtcttcaattttcttcgcgaagaagaagtcgttattgcagtgggtttggattttctaggtagcagattctcattccgtttacttttttgttgatattgaacagtccaagcgtcttcgcataacattaagaccaagatcagggtgttgaagaaatatttgaatccaaatcaatactagtatctattgtctccaatccaatagcacatatgctgaacatgacatggaaacttcttcatcatttacctagattgcctcttatctattgctgatacagctttccgtccgatattacttctccaaatgctcaaatgtcaacgaaagaattcaaaaaaatcgaaaacgtgaatctgccatctctaagtggaaggaaacgccttcacctaaactagacaacgagcattgtgaatttgtctacgagttggttggtgaaagtgattctactacttagaacgaaaccgtgcaataattaactgacaactatgaagaattcaaagtaacaaaagtgttcttcaaatgtttcttcgttacttttcctttggtagattattattaacaagaaaggaactggggtttatgattgtaaaacctcagtctttgaagctttgactaggtcataaagcagaacctatttgatctcaacgatttattgttaaattacgtctaactttgccccaaaccacagaacaggaagtgaaagggaaagataaagagatagcttcgtaattcacatagcattactcgagtaacagttacaaagtttagctgttcataaaacaagctatcattgatagacacccaaatcaaaattatggacaatgccctctcattgaagtaaaagttctggaatagttattgaagcagaatgatacaaatgtaagttcttacctctcagttctccataataaacccaattgaacaatatttgcttctattgaatcaatctaatagcgaccagtttctacgaatggatactgtagaaggggaatgtctaaagctgccaatacattaccaacagagaactccttcattgtatagaatactcagttcgttacttcgagaattgtctcaatatgtaaccgatacaaaaagtgttaaattcttctctagtactagacgagtcagattccaaaagtgatattaactgtttgagtgatttgtaagtattttcatatataataattgctgagatcaatttcctcatactgaaccgatttgatctcttttaaggctctcttccggtagtgttgcaaatagaattcaacttgattcatttttgagacatgtgaactcagtagccctggtagttttcgaatctaaatgttttctgtactgcttagttatacattctggtagttgggcaaaatttaaaaccgtggttcactaatggttcatccgaactcttgataagggaggtgcgaatagtagtgaaaaatatgtagctatttttgtcttatgagaatgaagacgcacaatgcatttccatgcatatttgttgcaaattaagttcatgggtacatgttctcgaagcaagacaaacgcgttgcagaattcaggattgtctgaattctgctcttcacgacactgcttgcgacaccttggtcagaagctttccgacaacaaacttttaagaaaaattctttagttcacttttttgggagccaacagaaaggccactgcccttatctttggcaggaatagttgcctgtgccgcattctcttcatttggtcccagtaacactttttacttcctgtgttctcaatagcaagtggcaaatgtcgactcaactcaagaggggaaggaagggaaccagaacagagaagacaatatgttggaggctgcatactgcatctgcggacacagaagttaaaaaggtttctgaaataagttccaatttttttttgtcatggctccttgcaatgctctaaccaccgacaaataggggtctactcctcaattgaacgacagatatgaaagttgtctaactcggaaaattgttctaacaattttcaaaaagaaacctacataatagctaatattccagtgctcatgttcccctgctgtgcagtctatagttgcttcttgcgttgatctttgggttcaataatgatcggcgtcgagttacatctaggagttgatattgatgaattgcaaaacttattggtaaaattcatgaaggtctttaacgaggcttttcgatttcccaactttctctttatacgacggcaaagaaattggaggaagaggccatagtcaaatacgttggaaagctattaaggagatttttgaaccttcttcgaaacactaaccgagttcctttcaaagtcaccgacagttgtcagtcataggaatctattcccttgaactccttgatcttgttgttgcagtccaaattcttaaaatatgttgtagccattgatcttcttgaattgaccaccgaagcctttgatatttttcgatctgctatattgcattggatggttattttattgaataattgctttattatcatcggtaccatattcttgttcccttcacgaaccaattttcctgaaaggaagatctgtcagtgactcccgtctcttgggcttttgaaagctgttcaggttggaaaccacgaatgttcaattcagatgtcaatttcatttaagtgtggtctgcaattttaaaaggaattgaaacaaataagctcataaactccattcaacttgaattcgtcataataggcaatcggtcatgacagacacttttagttagagtaaaggtagaaagctgctgagtctgaccttcaataataagctgacttgctattcaaattagaaatacgctggtatcttagggggttttattattacaatgaaggaaactcccccctaatggaccaggtaaagtgcaacatctgtgaagaaaaggaatcagacttctaatgggcattgtattgtatattctcaatatctgcaagtatggtttgggacttcgatgttgttaagacccagctgtctctcatacattgaagtatagtcgttttgaacaaatggccagcgtactagagaaggctctttgatgactgcaattagcaatttttcggcaacctcctttctacaaagtgtttcagaatctacaaattgaaacagagaggctatggtcgatcagaattacgggagagatattgcgcggtggggttgcggtaccgaagttaccattcttgcaccaaaattcataatattgtttgaaggcatgtctataagtatcatgcaatgcggtgcaccaacatgtacagtcacttctgcagtgatgagagtgattttacgaaataccgtagatttgaatgtaccttcttcacaaaggcacgtcaaccatggtaccaatatgcacaaaatagaccggagtgtgccatggggagagaaggttatgggggaagattgtgttgatattttacttgtagaggcaaatcgggctctgaaaatctacgtagaaaagtaaaaggggaattgccatcgtatgcgtgatatagcatcgtaaaatatttgcccgattggacatgtgtgttttctagtgtctgaagtaattgagaatcttcagggcagtaaggagcccctaaactcgagtgggatttgaagttcatgttgtcagaatcacttgtcttatttgacaagcaccgtcttcatcatttttccagtgctcttttcaagttggtttgtttaggctaatagttcgagacgtagattgaatctgataatacaagtgaggaaaccattacgtaccatattttgatgtagcaagcgtgatgcacatttgtgatgcattgtcgagatgaaaattacacaactttctgaataaataataataattcaagcgtcaagtccaaattataattggccaaaaaaggaccaccaatttcaacccggtaaataggttatcttgcgactgatttgcaatcgggggagtacaatttgtgtacctacccccaccattctcagtttccattcgagactctacaaatgaatagtaatacgggcatttcccgtattctgcttcactaaaactagttgctcgagtgtaccaacccatttagttgcagtgtcatgtggaatttcatctcttgcaggatgcagctaccaagattaatatagtttgccctttgccctcattctgagaactggaaagggaaatattataatattttttctttttgctgcatgcggacatgattttgagttccgatttcttttattttaaggttttagtcaacatgcaaggcatttcctgtatggacttttagtaagtgtctgataatattccaactccttcgtgtccgtacaagataagatggttgggcttctaaatgttaacattttcaactgagactgctagatgggccgtatggcgggccatatttgatctgggtcttctagtctagatgtatttcaacgatggcttatagagccaatgggcttctagaaacagccagagtttcccttctccgacacagtttcatcgtccgggcatgcgtatgatgcagagggaattattcgatcgcgattgtgtactctatcgcattatgtagctgtgcctctcgttaagacgagcgtttctggcattagcggcagcatcgccggaaggacagcactttaacttacaaaggctgatgtcgtcgaagattattaaagttttcgacggagtaatagaggaaaagagttagatattcttcttgtgcgtctgcaagaatccttcaactcgagaattttggcttaaagaggtttaaagtaaatatgaactgcaactgggagagttggagacaacccggtatcgatattgagttctgatgtccactttctactatatgattgtttctaaatcattaagcacggcaccaatgtgttgctccggatattgggtaagttctccgtctttgatattcgacaaaccatggatgccggaactagacacaaatgaaagcaaacggtttttctacactgttctggcgctgatcaaaatttgaaaatctggtcgtaattgacttcccatatattggggtcgacagtacagtcaggtaataactgtacagatgaaaataataatgtttataataattgttatattcttttgtgattctgcctgtagatattctcctcatacttaagttagttattgtcgcggaaaaccagagtaaaaccttgtttcacagtggttttctttgcattgcaatgctcgaaggtctcccctaggtcgaaaccttaaaatgcggttctcaatttcatccattgtactgttgttgtcgaatggcggagggaatgaacaacagcttggaacacagctaaaaatccagctaggttttggtattatgacgacatatgtacgtgtatgcaggttgggatttattacccgtgtatcgtgcctgtagccatcccaaattggaaatggtgcagtatatgtctgagattgaaattgtctgtctgaactggcgagaattatttttctggtggtgtacaggacaacatcttcagtagcagtcctccgacggaatataagattggttgctgtagtttggaatcccgttgcagacctggatggtacaaaattgaaactcaaccaggtggattaacctggaatctctcaaatctctctgggatcaacttccatgtgaatggaatccatcgcgagcaagctttttgccatatgacaactgtccgcttacagtatgctgtgaaaaagaatttgattataattatttggccaacattatcagtgtacatcaaacgtgcattcaagttcacaggcagtagcctcaaattagtgggcatcaagtatttatttttttgctggcttcaagtatgatccaaacgatattccgcaagagaagccaattgccagatcagagttgggtactcgttttttagagggcttttggtagacggcgatagcaatgtagatctctacggtagtgaccgaggaagaaagtgaaccaatatttaatattagagtttagctgaaaattgtagacgaaagtgtaacggtagccgattgtagtttggcttgcctcgtataggcacccaaaactcatcgattcaaaccattgccaacctacagtctctacagattctacaatgatgctggcagggctcactctcgactaagagaagttctacaggctcttgctcagacgatacatgctgctaccgattgttctatcgttatatagttatgcccgagtaacagcagtacagaaaggtgaaatgttagtacaatcagagcccattcaatgcatatgagccaagaaggctactatgtcaattgaagtgattgggatgaaccattccaacaagttcaataactccactatttgagccttatcttagcacggctttggggacaaaagaagtctcttacaatagtggtggagatggatttccacacattgacatttgcactcagtatccaccatgtggaaagacgtacgatccgacaattttttgctaccccttttaatttctacgatgaacttccagagaacgagccaaccaataaaaataggctttcgagtctgatcctccacaaggcatgtctagaagatgagcgatgataatattgtcgtttcccagctgcacaaggcttgaagtgcaactgaaaactgcgacacgagagcttgtttcaagttttttacgtttccgataattgaaacttgtggaagtatgccactcaggtttctggaaaattaggcgttaagtgatagacaaatttttttgtctgattttcaatttgatttacattttcattttcattttctaattttcgggctttcacgaattggcggtgataatatttgaaagaaatgtcacgccatcagagccggaatgttattggtgggataatgtgagtttgacgtgactcaaggaattgcgaaaggttaacattgacaggtcggtgttaagaagcatcgcttgcttacacttgatccacctcggtgaaaatgtcttgatccacactgactttttcgtatcatttatgtattagtcatgcacatccattcatacattgcatacgcatcataatcaaatgatttattttttcacttcctggttcttatagacagactttctaataattttttttatttttggggttgctgtacaatccaaaaaatgtacatgaaaactacaatactttaatagcagtggcccccatttgtcttgactgtagtaaataacttcttcgatttttttatatatttcatagctactactatttttctgttgttccaaatcgaaattgggttagaaatactggaagtaatatataactttgtacctgttccatttcagtcctaatttttctgattttattttgcccaaaaatatttttgttctgccaccggtgagatttaaatcataacatatatttatattatatatatacgagagtaccaggaatcacaacttttccagctcatctccatacttttgaaagtgttgctcctctcggtacatcagcacagaccttcctagcatcggctattttcaccattagccgcatatcgttctcacggcctccatctttgaccagaaccaaacgtccaccttgagttctcggaagaatcgtcccaaagaaccaaaatcaaccttcgaatcacgccaattcgactccaccgtctgaagcacgaagtatctatactagaccgttgaaatcgggagtctttgtccaacaaacacagccaatttcatcctccagtccatctcagcttccagagcccgttctcaagctgactttgttcgtgtgttgattcccgcttagccatatacatcttcaactagctccgactagctcccaccggtaatcccaaccatagaaagagcttatatcgccggcaaagctatcttagcccccaattaccccccaaaacgcacttggctaaagcgcagaaaaaatttcgaagcagaatccaccctcactcttgcggaaaaaaaatccagtctcactgtttttttgatatcttgaataattgtttgtttatttgcggttgctagcacttcagtctggttcacagcaagacatacacagatatccacaagagccagcagtcacgttcctcgatcctctgccccagcttgtaatagccagttcaattgttgtaaacaaatacaaccttgagtactcgcaaagtgtacctcattggaaaacaacaaagagtaataacaaacaacaatagtagtacaagtagtgttacctataatatctcagtgttacttacagcatatcgtttcgaacgcgttcttcccgatcccttcagtcatttccctagcacggtagctgaacatcatcatctgatcgtattgatcgtctagtggtatcgtagttcaagagaagttggaaaatctgtagaaatcttttttccggtcatctgaacacatttattcctgatatcttgactgtattcattccttcatctgacacatctccattatgaacggcaacttcaacaacggcttgcaacagacgtcggccacggcccaacagtatccttcacagccgtacggctcgtactatatccaacaaggccaaccccaaacgacgcagtcgatacaatccacagggcagcagacccagcagcaacaacaagtgcaaggtcagcagcaagcacaacatctgcagctgcaacagccgcaaacaggcgcgtctgcgtctgattattatgtccgctaccagacgtcgtacggtgctgctccaccaaactactccatgtaccagcaatcgataccaggccagttgtcgcagcctcagcctcagcactacaaccagatggcctcggcacagaccggcgctaccactgcctcgtcctacgggtcagcagcggctgctgtagctagttccagcgttggaacgacgtctaacacccaatctacgccaattcaggacaccatcaactcctccagcaactccactgttagccagtatcagcctccgggaatcagaccccgtgtcaccaccacaatgtgggaagacgagaagacgttgtgttaccaagtagatgccaacaacgtctcagttgtcagaagagccgacaacaacatgataaacggtaccaagttgttaaacgtagcccagatgacgcgtggtcgtcgtgacgggatcttgaagtcggaaaaagttcgtcacgtcgtcaagatcggatccatgcatttgaagggagtttggattcccttcgaacgagcattggccatggcacaacgagaaggtattgtagatttgttgtaccccttatttgttcgtgatataaagcgagttatacaatcaggagtaactcctagtgctagcaacgctgcttctactggtgctgcatctgctgctgctgttagttcgaaggctacatcgacaccaacaccagctgtgcaaccttcgctcaacagcttctatctgcaatatggtcagcaatatggccaacagtactctgcaccacaagtcaacggtacagcaggtactgcctccgctgcatctgcaagtgccaccactgctggtgcatctacggcaggaacctctgctacgggccagcaatcgccacagcaagccacatcgtctaccgctactaccgacagctatcaacagcagcaacagttgcagtttcaacagcaggcccagctgcaaactcttccccagctgcaacaacagcaggtttatggctaccagcaaccatactacgccgcctcgtctggagcccctaaccaatactatccatacaaccctactgctgctagttattccagctacgggaaccagccggtgtattcgccttttggctacgtgaatcccgtgcctccccaaatgcctcaccaagctcagcagcctcatcagcagcagccacaaccagccctgttaggtcagactagctcgctagcactggctcaaacttctgcagccaatggtagtgctgttgcttcttctgatgctgctagcaagaaggaagaaaaatagagtgaaaagttcaagccggaatcataaagagaagaaatcaaagatacgaaaggtctaatggtttttgtgatagagctactactttgtaatatacttttatgaataccggccatgaatttttcaaaaaaaattattgttgtggtttatcttcagcatgatttctggcattgctcttgattgcaaccgcaaccctcccgttaattcctagtcatacactcctcgtctaccagaattgctagcagaagagagagcttcgttccaccaactgtacatttttttctaaacaaagatacttagaagagtttttgttacgctagatctatattttcatttacttgcttcccaaaattacattgcagtacatcattatagttgctaatccctcgtttttgtttttgttccattatgagtatccattgttttacaactagttccaagtttgcttttgctaatcttccttcctttgtattaaatagtgtatttatgttctatacttgtcttcatagcgtagccagaagcgaattattactccttactttaaaattattcattaaacgataatcttcttcagaaacgtagccctgacgcctgcgcacacaagcggtgcaatgtggaccaacttggcatattatgtgccctagtggttgcacctacatcatgtgggtaacaatgcgagcagcgtttcgaaaacaggttttttgcggctagctcgcctgtatcacacaaactgtctttctcgccacctcaagcgacttagagagcctcctatagattaggggcagtaaggcggttattgcggtggtataagtaaggggatcgtcgtttacgaaactgtgctgccccccaagtgaaatcgcgattgtttccaatgcacaatacaaggtttaattaataggttgcgtgagcccgcatgtatgcatgatgtaagaaaatttaatacgttcgtgcaatttttaaagtaccatcccacataaatacgacaagaaaatgccagatggtgtacctgacatgccttgtgtgttacagtgcatcagagcatgacagaagagtattggcattaatattagcgttagcatcagcatggcctagcattcttcggtgcatctccaaatgcaagtttgctctccctttagctttcgcttctgtaatattcctctaaaccttatagacagctacaaacatattgcatagacgtattatttacctgaagccatgtattacttcggctgggagcacgatttgcatagcgataatcaatggaacctggctctaaactctgagtctaaatagctcagcaatcctaccctttacgccagagagattagcggttctgagttttgggaccatgtagtagataattttccttttcacaaaacagtttatttttgcgccgtaacagacaaaaaaaagtcattgtcgtcttcaaataagtctagcccttgcccatcatacgaaatatgctcatgtgacatcatgccagtcatcttatggcgttttggataaaggcatttgagccaatagcggccctccaaaattcatacgtcatgtgcaagggtctcagctgccgacagacgctgaattacagaatgcaacacgactactgcggactagccgtatcatatacattccccgtacgctataggagtatagtttgtggattttgtctgtcacggcatgtgggcctgtctgcaactaagcactgaggcagacaatttggaatacaaattccggattcattatatattgggaatgtgtccttgttttggttcaacttaccctccataaattagggttcagactcgcatattggtctggtagtattttccacgcagtgtaacacatttttgggacgatctcagctaattacaaaccccccgttaagtatcactccatatttgcccctgctacgcctcaagtcggaactttgtgctttgactcaaggtcgaaggtagaagtttggcaaggttgaagtttcaacggtgtttattttcattgagaacaagcattaaaatatgacacagtcctgttaacctgcgctggtacttacaaagtttccggaattatgcgtatactcatgcaaaatgcacatgttgaagtacaatgtcatgtaaagctaacgcggagagctgctcttggctgaatatctgtgaatttattaagaatcagacatattttcccagcggtgaaaattttgaatacagctaccatctttttctcctttaataacgaacgattttctcgagcactatatggcccattcaaattctttttttgtatctaactccacttaatcaaatagatcaagataggaaagaaatgtcctcgtgaattcatccttcttttgatcaaacttaccacaattcaactactagcccagtccctagagaatcctttatgaagaaatgaaagaaacatatatccagatgttctcaaaagcgacttaatatcatgaatagctctaagagcttttctattccaatctgatgatatttccaaattgaaaatgttcaggactcaagattaggtcggtggcacttagaacacctatgaaattccaaggtcatatcaaacaaattttgagcaaattaatgttattattcaaaagtggaagcaaactgactccatccaaatgatctgaaatccagtttgttcaattctcaattatatccacttgaagtctcaatcctatttggaacattccagttcaataaaatgatagccagaaagcttcctcgttccagtttgacatagcaagagcttgaatctctttaaatcttatgggttgaagatgtcccatctataatgggaactctgtccacaaatagcaaattaggcaatacttcgcttgagccaaatatgaaaatacccctttgttaagaagatttgtctccagttacgtgcctccacctactgccgcctattcttttaatggaatcttgcaaacttcttgccataatatctagaataactagaactccttggacatcagacttggtggagttattgagatttgagcttagttcgaaagtgttatatcgttgatgtcaagatcatttgttgaatattcatataagtcttcttaaaatccatgtggattttattaaaattttgggaaatagaaaaatgaatcattcaacagaatccagacccagatgtcattagattaagctaatggttgttggcgaatgtgactttatcgtagtcgttcatttcaaattaggcgatatccacgagtccatatactttcattttccagcctatttcaggcaaatagagtggcaatttcactaacaaagcacaccgatttattgctaggctgtaatcacccataagcgccaggccaaagaattaccaataaagctttaccggagcgaaatacataactattttagagagatccaagattgcttgcagttggtagatatttagtttttctagaaggtgctcaatatcggttcactattttcaaactttttgacgtcaataaagattaggattactgttccctatagaatctaagggtcctattaccaagatagatataaacggaagccatataaacagaataactagggtttacaactttattaggaaaaaacggggtcacgtgacttttttctgcaataaaacacttattaaaatagaaccagccaatcaacaagaaacatccgtgatagtttagtggctagaattaccgcttgtcgcgtggtagaccggggttcaattccccgtcgcggagttttcgttgcgcaaatggtttagtggtaaaatccaacgttgccatcgttgggcccccggttcgattccgggtttgcgcattctttttgcttcttgatactatatggaattgttttaatcgttcttggaacacttctggtgtagcttgtttaaattatagaacttgagaccaatttgtgtgaacgactgcgtttgcgcccatatagtagacttttttggtgtatgaagcctcaatttaaggaaaaaaatccataaatataacccgaaaggaagtagtcaaggctgcgtggacaattaaccactggtgaccaccttatggttcatactttgtctgggtttggtatctttgagcctgctatataagaagttcatgccttgattataaatgtccgatgtcggctcttatctggctgcactaacaggccacgacattttgtctatataagggacaatttcaataaatgagttaacaattttaaacctcctgctctttgccaattgactctcaatttttgtcatattctatcttttgtttgaccagagaatgcgctacttgtcagttttatcaattcttgttctcattgccagctccgttggttatcctgtggaaaacggaaaacctcaattggttctttctactaagactaataatgttaaatctgaaaacgacaattccgccagaattgaacggattccggaccaagtcgagggggctctggtagcccggactttggtaaagcgggagtctcttaccaatctcaacaccataaagaaaatcaaacgtaaggacggttctgttcgtagcttgcccgtttctgggatggagtactatgcagactgtgacgaaagtggggatccttacctcctcctagtagacatagggtcgtcgttccagaatatcctcaagggctcggactattccttaactatcagagccggtgatcatccgctgatcgaaaacgtagatctcaattaccccggaagtatcgcagcctctcctgctggttctccacgagttcaattgtccggaaggcttgtgcagctcacatatacgagtcccttcgatccagagttgatcaaattggaaagatgtttccttcgaagacaccctgatgcccagctttggcttcctcacaatgtggtttccccgcattcgtcgcactggttcaggtttgaagtcgatgatgtctactttgttggaggttttggatcgctggcatatatcggtgaaatcgatgctgatttgtaccactcggtaagcccattgccagaccccgacaactcgggcccactttctggggatgactccgaagctttgctttaatgtaaatttgtttagtgcctggtatcaaaaagctcacacattagtctaatattgcaaataataaaacgtcttctgcaattggtagaacactctctgtaggaacaaaagcaaccccacgtcaaacgcaaacttgactttaacaagaaaacggataatcatatagactgtgcatatctccatgctcaaccctttttccttcgagttaccccaacgcacggaaaaggagacacaagatggtattacttcgcattacgtaaatcttgataattgtgttaccccacaaaatctgaatggctgcggaaaatagtttttcaacacactagatcaacaatagtgctttgttccagcatcaacatgaccatataagaagtcatgattggccccttctgtcaacagtgtatctcatttgctataatattataccagtacaacaagaacattttccttttgtacaatatttaacttcaatgactgctactaattctaaaattaaacactcgaacaccgacgtcttgatcgtgggtgctggtccctccggtctaatggcagcaacctggttggccagaactggtgtacccttcaggataatcgataagagatcaaatgacattttttctggacaggctgatggtttacaatgtcgttcgctcgaagtgttcaaatccttttcgggcacaacctttgatatggctggaatggattcggcttggaagatgggtaaccatatgattgaaatttgtttctggagtccagacgagaacggcaagttggtgagatcaggaaggattcccgatactatcccaggaatttctcgttttcagcaggtagttattcaccagggctacattgagaattggtttgaaaaatcaatcaagaagttctctggagactcggtcgaggtggaaaggccattcttgcctttgaacatcaagatcgatgaaagtaaagttgacgatccagacgaatatcccgtagaaatcttagtcagaaacttgagtaaggataaattgtctaaacctgaacaatacgacaatgctgtagctaatggtctctacagacagttcgaaggtgatcaagagaagttctatgacaacatgcaatcagacattgaaaacgatcctactttggatgtaagcgagtatgaaattattcactgcaagtacttgcttggttcagatggtgcccatagttgggtgagaaaacaattaggaattgacatggatggtgaaaccaccgattttgtttggggtgtcttggatatggttccaatcactgacttccctgatatcagaagtcgttgtgcaatccattccaaagactctggttcagttatggttattccaagagagaatgatttggttagattgtatatccagttgaaggaagttcctagagaccctaggacaaaaacagaagcttcaaaatacactggaaatgtcgatgacaagaatgccgcttcaaagggaagaatagatcgttcgaagattactccagaactaatcttaaaaaatgcacaagaaatcatgctgccattcaagttagaaatgacagacttggattggttcactggctatcaaattggtcaaagagtcagtcctcaattcaacaagtataacagagtatttatatcaggcgatgcttgtcatacacattcaccaaaagctggtcaaggtatgaatgtctccatgatggatacttacaatcttgggttcaagttggcacttgtatgcaaaggtttggccaaacaagacatattgaagacttacgaaagtgaaagacttcaagttgctaaagacttgattgcctttgaccataagctttcgagaatgttcagtggtaaacctatgattcctcaagcggaatctttagaagaaggagttgatatggacgagttccataaagctttccaattaggtaatgaatttgcttcgggtaccatcgttgactacaacgactcggtattgatcgacaaatcgaacgttctacctgctgatgaaaaagatagaacgatgtccaagtatgcaaagaagatacctgtaggaagaagattgaacacagtcaagattatcgcgcatgctgacggaagaccttatcatatagctgatcgtcttctttcggacggccgtttcagagtattgatattttcgggtgatgttaagaagttcacaaaaaacatggacacattggatgaattccagacttaccttgaatctgaagaacattttgctaagaagttcacacctccaaatgccttcgataactctgttatcgatgtcattacagttcacgcatctaaccgttacgatgtagaactatttgacttcccagaatttactaggccacttgatttcaagtctagacgtgactactggagactttattctggtgttggccggacttaccatgaaggtacacttgatgcctatgaagagtacggcattgacaaagaaaaaggtgctgtcgtagttgtcagaccagacggctatgtttctttggtcactgagtttggtatttctggattgaaggaaatcgatgcctactttgacaagttcatgattcctcagtcgaaaaacgctttaccagttaagtcacaaggagttgatgacaaaaagagattcgtgaagccattgttagctgtttagtttaggcaggttaagtttgattttggatatactttattaaataattaaataagcattatgaattcataaatagttacaattgaatgagacttagttcagtccagacttgcgcatttgtctcaatctttcttgcttttgatcccaaaacatttcagcttgtgtcacagcatataatgccttacccatagctttgaagtcggtcatcaagttaacatgcccgcaatcacttgcaaccttgcaaacaatatcaccctgtccagtggtattattgtagaaactaaaacctttcctttcaggcatcaaccacttctggtgtacaactccatcgccatgaccgtagaaaaactcgtagtagttaccttcccttatgtcatccaagcctcggacaatcgatcctctcacagatggaacggtattaccataaaccatagccaaaggtggatattctggttccaactcttccctatagtcaagcgaaaggatatactcttttgtcagtttcaaagtctcttttagatagttgtaggcatcagagaacgaaaaactatagctacgaacaatctcattgtcttcgtttgacttcattgaaaacaacgaaggagaagttgatctttctggaagggtaaattctgagctttggttagaagcctcgtccaaagaagttgtcttggatcttctggttagagataaggcacgatagttccttaatttattaccaatcaggttgatactgaaagtggagtctgaattggcaatcatggtacttctactactattgacaacagactcttcaagaattcttctttctttacaaaccaaggggttcaagttatactccacccaggtctctggatcaaagtagtctaagtcgtaccactcattcttttctatgttataaaatactcgtccgcttaagggcaagaagttgaaacttgaacgcatcatgaagttcgtttcgtaggtgagaatcttgtctgagaaaatcactgagtctccaaaccgtataggacccaagatgttgagacattcgctgggcacgccaacatatattagagatctgaatagcttagggtttctttgcaatgccccatgtgccatgagtccacccatggaatgagcaattacaattgtaggcttaccggttccttcatagatgtccagaaggaacttctccaactgcttcgaaactatagacccactcaatcgccagtcgtaaccaaactccttgacattggttttgggattgctggcaagctttttgatgaactttttgcagatatctataggaccaatattcttcaacactccatcagggtatatgcaatctacagccctaatttcatcctcctttgttggccccaacaagaggttgatttttctcaagttgaacccagccttgattggaatccacaaccgttttccagtcttcctgtctcgcaagatggacccccggtaccctccgagaattacaatgttaccctcgatgtcgttgtagatgctttcgtaagtctcctcgtctttcttgctctgcatgaagtccggaatcaaagtcgacgtcaaggtatgtttaacggccctgaaccgtacatcatcagttcccttgaatttgcgaaaatattcagcatcttccaaggtgcctatagactgctgtcgttccaaacgtagcttcatctgttgcttctcgtcactggaattatcgtcatgattatttccgattatcggaagtgagtctataagtggaatcgaatggatcgaatcaagtcgtagggacgttatttgcttgtacaacgaactactgaaagaggtgagtccgccaaaaggcaacgagaatgaaaagatcttctgcgactgagcccgaacactctcagcatcaatttcgtcgtcactgaaaggagtattcccaatcactctctcttgatcttgtgttggccgttgcgaatcggctatagggtgtttcttctttgcatagctactaacaacagcatctcctcctacaatggaattggcgtcgtttcgggaaagtttccgcgagagcgaagtgctgctctgattctggctcttactgagagcgccaataaagtcgactggaatatcttcaagagcatcttcatcctctagatcttcctcaaaatcgtcatcatcttcttttacctcttcgtctacttcttctggagaagaattttcgatagctgaaaagtcatctttttcgccacgatacagatctaatttaaggtttgttgtatccactgggttatttatgtcgttggccatgatgctagtgtcttcatacagccttgggtgggccgtttatttagctcctcaatatgatccaattctgtggagaaatccttctcattttattcggcaagattccgatccaaccgagtcggttctacaggagccgagagatgagatatcacgtgagcattgtccttttctggtgatagatccggggttgaatgggaagaaagctgctacagccgcaggtgatagccattagccgtgctggaattgccaatgttgacaacttcaaatatggaaagaactgtgaggtatgaattgaagaaatgtatgacgtcgaactgaatacgcttgtgaaattgtccagttcgtgaaatctagcaatcttcgtcgttctttgattgtgggcttgcccaatggtaaaatccaagcgacagaataagataaggtatctagatgatttgattgaaatagggaagatctcatgagatggaaactcccttatataaattgagcctgtaggcggctttacttgaagaaggtgaattttgaaggccccgcgttattacgagatctacatatttaagctcacgtagatttaaagtataattcaaatgaattttcctactggctcaagtttctctacggacgtttactttattgaaatatgctgtatctaatgtatgtcactagtggagatatggtgcataaattacgtcgtcttggtgagtagaaaagcttttagtagtatattagaaaaaggtgcaaaataatgatgaagaaaattaaacctaatagaggtttgaacactatttaactatggtttgtaccaatgctacaataatccttcggctcaagtaactttttcctaaactcaataaaaagaaattcccatatattggatatacttgcttaaatgtcaataactgaataaaatcactagtagatattaaataattgtcctggattcacaagaatgaatcgactgaagacatcttaacaaaagactcagggacagtaacgaccagcattgaattcttagtagaccgcatctgtgtcagacacgatatcactactcaagtctgatccctaagccacttcaacttatggagtcgcggagtacccctgataattgcagctataaccaacaggtagccagaagccgaagaaaaaaacacagctcacttcatagccaaatacgttgtaatagtttgtatgctggtttccttggacttctctttatttccctttagtaccaccttctcagaatgtatcttttcaggttttccagaacggaaaacatttttaacagcagcggaggctctggaagcaattgtgcttctagaggaaaccgaatttaccgaaacggatgcggaatcagtttttttgagcgaagacagcatttttttggtttccttgatttcagtggaatatattgatgataattgatacttaagcaattttctaactacgaacagggcagaaatggacacctatttataataattctacgaactacctttccaaggcaaggttatattgcaagttcgtatatgtgggcgctaccaaaaactcggactgtataaaccaaattcttggttcaactgatgacaaatttatgcactgattaataacccaaataccgaatacggaagaagccactagtctcttggagtttcaaagaaggtctccgtattgatggtaggctccacacaactgaagggattagattagtattctgttattagtaatcgaatgccttaaagctattggaatcacagctttgagaaattcgcacccacctggtcatagccagctgcagccttagattggggctcggatgcatgcggcagcaagaatacaaaatagctctttgtctatttttgtatccctatgtcctctatttagataagtatatcaaaaatcttgctttcaaagtggttaaaacgtttatgagtcatcgatttttctagctctatttctccacgcttgtaattgcctcagccttaggtacgtagtttcgaataccagatctaccacagagaagtgaaagaataatttcgtgtggcacagcagaatcacagtatttgtgtttgtcatttcgaagatcttttatgtctatttctctatttctatagacttccttccctttggaagaagaagaagaactcgctgtggcttctactccagattctaggatcaaagaattgactaacttgtatgcgttgcacgagttgttaaccatcaaggaggtatagatttattccacctcagaagttctggtagtcgtagttgtagtaggaggcatatttggaggaacacgcccagaaagaagtgatactagactaccagagcagacttttcataaattgaaaggcatcttctagatgaaatcatgttcttttctcatatatcttacggcctgccttaattttgctcgtacgaatattgggtacaaatgaagaacatatatggagacatgatactgcggaaggaagagcaagatgcaaatggcaagggtttgacggaaatgctagaatctgtcgaagaagaaaacaaccaagttattcagcttctggctatcacttgtacctaacatttatgttttccttttatgcttacagtttatgctctccatgatagatggtatcttcactatggcagaattcactaattgtaagtgacgaagcgtgaccggaaatatattgaacgaagaggaagtgatatcgatgaaaaacaaaggtgcattcgacaaaggtgacaggcacaacgatttcgatattttgagggccgtcaacgaaccacttggagaaataacattggcgacttcgtattttcaggatcaagggaaagaagatgaaaaggaaatagatacgtatcgggcagtacaacttcataggactatctgttgttttcatagcagcaaagcttcatgtcgttccatcgttcacaccctataatagcttgcaaattcttgtacagttcatacttcatatctggtgcttggcagaatatggttaacccgcatgttaatggaataattatgttgaagagttgaagggaaacatttctcaaaacaaccacaatcaaattgagactcaccgcatcaatacctctagttttcttccttcacggcaatatcaaattcttaaagtggcctcattagcgtgtgacttacgcagcgaatccatagactaaatgaagtaataccaacagtcacagagatgctgtctacttcgcctgtatcaactgctctatcacttggctgggccactctacaacgtagtaatcgtattccagaagcccaagtataaaaaatatctgtacattggtccaaagcagaaagaaacaaaagcaacaaccatctcagcaggaagaaaaatgagtagtagtctttgtatattattagattcaaacttcactataagctatacttactttacagctatctgtttttgtatgttctcaagatttctcctgattattatttcgattaaaccttgttaggcaccaaaatagagtcgtcaatattttctatcttttcaatgcccactgacttgttagtgtccaccttgaaaagatccctgtcgctcaacttcgcttccgtttcgagtctagcgttattcaagacaaatttatgagcggcatgtgcacttaagctagaatcgaataacttgtccatgtcttccaaggcgatacccttagtttccggaacgaagaagaagacaaatggaatggacaagatcgccaaactggcaaagaagaagtagataccatattgcattttgtcgatcatgttattagtaaatctcgacattataaaaataggcacccacgaaacagcagcattaatagcttggacgaaggatctgatgttttgatcaaaaacttcactaccaacaacaaagggtccaccggaccaagccaaaataaacgatgcgatccaaatatacataaatcctatggcggctttaccacctggtcctgccaggttaccgggttttgtaggatcgttaatcttcaagtaggagccaatgtaccagaaacaaactgaacacaaagcagacgagctcatgaaggcttttcttctgccgatggtgtcgacaataaatatgatgtagatgaatgtacagatgaacttgaccacgccaaacataccagtagaaaacaaggtggcattagtacctttgacaccaagaccagcgaaaataatcggcgagtagtagttaatggactggatacccaagaagttttggaacaaaaataagccacaagtaatgcacaatctctgcaatacctttctgtttctgaagaacacttcgacaaagggatcccaaatgcctaaaccaacgtgttctttctgatagttgatggactccttgacctggttgacttcatagataatatattcgtggtcctcaggtaagtttctaaaccacaccaaattctttatggcctcgtcgtatctgcctacttggaagagccatctgggggattccttcatgagaatactgccaattaagaacaaaccacttggaatcatctggactgcaaatggaataaaccattgctttttagttggagcgatgtgtgagtcgacagcgtaggctatccagaatccaaccaagtcaccgattctccagccgatttcgtaactactcgtaagttggcctcttatagctggaggagccacttcagagatgtacactactgtcaaattcgtggaaaatccaactgcgattcctgccaaaactctgccggcgtaaatgggacccaagcctactgatttactagcagccaacatgatgcccgagcctacagtgattaacaaagcagccatgatcaaggaaatacgtctaccccagtagtaggagcagggatacgagaaaagtgcaccgaaaaaacagccagcatggaataccgaaatgatgttggatacaatgaatttggaatggggcaggccatcgaggccgaactcgtctttgaacgagtctagagccaccgttcctcctataaaccctccgtcgtagccaataatgatggcagcagctgatgccatgagtgccgtgccataaacacgatagttatagacctcagggggcgtgggtctgtcttcatctttctggaaaatgtttctgaatcggaacatcgatttcttattcgacttggtagctcttttgcgcagctccgaaagatcggattctgacgaaaatgatgagtcttccttttgagacacgtaaggttgcgtggatgcagttgatttgttgctgaagctcatagcagaagatagtagatatacactggttccggactataatttatccgtgggcatgtgacgatcggcgctgttacaaatttcagcttagtccaacgtcctatccagtaaaaccaaatgctgatgctaacctgtaaaccgagtactgcaaaaccaacggctcctgctccttttatatagctccagatctcgaaagatcaaatagttgaatcgtaaagctcctaatgcaccccacaaaaagcgaaccctccgatgccagcaaaagttctttttcgatgtacatatttttttgcactttacatggacgctcccccacgcacaccgtcccccaaaatctagggtatttggcatggagatgcgtgggggcaacctcaaatgggggattccgtgggggacacacacttaaacgttggatctcccgccgtactgtttaacttagacccctactaaaacaatactaaccagataaccgacaatgccagatgctgcagctacgtcaagtagtccgtatactatcgtggggtacatggaatccctggggttgtctttcttgatgtgggggatccaacactagaagaatgtaaagagacactgagcctacttggagttacacaatggcaatctgagagaagtggaaatgtgcagctgtgttagttaggatctcaactttacacatttggagttaatgctacacatcaagacttcctagaaaaccatatctacagtaacatggaatgtagaatatattattaattggctgaactgacagatagaccccttcaagccaaatcttctaaattgatattcgcagctaaaagctgatgtgttaaccacagtttattaccacctcagctacttatgatataggaacatatattatgttagtctgtcaacaactaagaaaggtgaagttcgtactgtagagtgcaatcaatttccaagaacaattataaaaaaaaagaaatcacccatacccttaaaatgtcaaaaaatggacgagacaggaatcgaaccagtgaccttttgcttgcaaggcaaacgcgctaccaactacgccacacgccctatgacttctaaaaaaatatgtgtaattaaaagtcactttaatttagtcacgtggtaatcatcacatgacacgatatttcgaaaaaattttttgaaagatttaacaattaaagggttcaccttgtcttcgtgtttagtgttttcaaagggtaattttttgcaagtttataatagatcaacacaacgaatagcatacaagtatcccctcgatctctggacactacagcactgtcttccaaacactcgtcttcctcgcacctcgacgcgtatgattatatatgcagtatgttctcgataacgaaaaacgcgtaaaccttcgctttggaaactgcaaacaatcaaattgaaaacttccagatccatctttcttcgaacaaaatccattcgaatttctcccagcaacagaagggccacgacgtgtgttgccaggaatactagaattagtgagctgcaagcggaaagagccgatttgaacaacttgtagcatatcaggtattgaataatcaaatttaagtaccagatctatattcgaacctaaatcgtggtaagaagcaatacatatcaagattacgactgattccatacaaccaacaacaacgccattacatccatagctatcaaaatccccaccaacccatcaattcatgaacttgacaagcttcacaaatcaaaccacttaaactcactacttcaaacttcactatgtacattacaccttcaggctactcccagatcttccacgatatcaagcgaacgtcactttcacattccacttgtaagctcgtggtatttgtatcgtgtctcgacatcgattcactctgtgctgccaagattgtcagcttactcttgaggaaggagttgattcagtatcaacttattcctgtagttggctactctgatttgaaaggtcattactccaaactcgatgcagacgtgtccaatgtcattctcataggctgtggtgccatgttggacttggagacgttctttgacatcaacattgacgaattggcctatgagttcagtgaagaagagctcagaaagcagagagggcttaacgacactctcgatgtcaacgacgatttgaaaatcacacttcacaaaaacattgcctttcgaagaaagatatatgtgatagatggccataggccttggaacctcgataacgtatttggttcgtcggtagtagtgtgtttggatgacggctttgtcgactccaacttggttgaccagaaatcagcatatgacgtactcgtagaacaagacgaggaagaaagcgaagatgaagacgaagacgaagacgaagagtcggcatcgctggctgaaattgacatctctctgaatgacgaagaaatatcatttaattcccaagattcagaggatgccatatctcgaaagcgtaagatacaagaacgtcgtttgaaaaatctcaagaaacagagaaaactcgagaaaacaatacacgaagaaacaatacagtcatattacaaccaaggtactactattatgacagctactacgaccatagtttatgcattacttgcttccatcggggaaacaagtttggaaaatctatggttggccattatcggcacttcttctctcgacaaccagtaccctgaaatttacgataagctccagccacttttgaaagatgaagtattgagattgaacccttccaataactccataagtaacaataacatcaacgagaaaacggcagactcgacttccctcagcatcgaaagagattatcaccttttcttattacgtcactggactctatatgattctttcttctactccagtcacgtaaattccaagctcaatctttggagagaagatggtcgaaagaagttgcataagttattcgccaagatgggagtctctttggcatcagctcagcagaagtggctctacatggatgtccgtatcaagaggcaattgccatttatatttaataagtatttgccaatctatggtttggaaggcgtagttcgtgaagggttcattagaactttcggatacacggggcaactttcagctatggaatgtgtggaggcattgacagctttactagaatccgataaacggttacttagtggagatcgtgaaaatactccaatcagtggtgacgaagatgactctcaggatgaacaggaaagaatacaggataaaattgatagaaaggaaaaggcttggataaataacttctggtcgtcttgggatgcattaaatatgaatccttcgactgtgaattccagcaagtccataaactctaatttcaagaaatcaaaggggttcgagttgttgttacaaggtttggaacaggcgaaggtaattcagcaagtgatcttcaaaacaggaatgtctcttttggagagaaaattggttaaaaacttgcgattgtatcgtttgtgtgttttgaacgatggatcaataccagacttaagcattttcaacaatccactaatgctcgcaaaacttggttcatggttgcttgaaaacctttctgagttattcctcatcaattcgtcgcagtcattgaaacccttagtagtggcaagtttggatatggccactgatacgtaccttgtaataggaatggcacccaagtaccccaggggaatggacaatactaccagagctaaattaatgcaaggacagcaagatgaccaggagaaaaatggagcgccaactttgaccaccaggcttaatacatttagtgtcgcatttcagcaattggctaatacctctggtgcaaaagttagaatcgatagtttcgacagttctgttatcgaaatcagaaaagacgatttgcctccattcctcgaaaagttaactttgagtggtttaatatagcataatagtatatgtagcattataaaatatttaatgtcttgtacgatacactagcatattcactttcaaatatccccatgtaataactaacttatggtctcttaaagtccttgatattatttcatagctaaatacaattgtacttgcaaatcaactacgttattttttttgctcgaatacacaaattaacacacaaactaaataatggagctgattttaatagtacacattaccaatctcatgaatataacacaatgacttcttttctaataattaaacagcctgtacttcccaagggcaacaaatgagtattaaattgaaagttggccaactataaatacatcattactttgatacttaatctatcactttgctaaaatgaagtcgtgaaatatctgacaagtttaacacaataagtattagaactattgcacccaatactgtcccacctctacctttcacttcctgctgcccacctattactcctatacacctccagcttgatccatagtcactctgctctggtgcatcctcccatcttcgtctctctgtctccttctcactgtcctgttctctccccactgctcattgcttgtcaatactcttctcttcacactccaatcgccaacctccatctccatctttcgtagctctcccccatatccttatatattctttttactttcattcccattcgctcttcattctccttctaccttctacccatatttatgtcattcgcgttcaaaggcttgatttgaagagctttcaccagagaaaacccctagaggtccctctggctgattgattggtcgtagttctgacatggaacagtttttcccaataatgaaccatggaccccccggtttccatatggtgcgctggaattttatgtatttcggttgcggccatatctagcagaaagcaccgtttcccgtccgatcaactgtagttaagctgctaagagcgagaccgagtagtgtagtgggagaccatacgcgaaactctcgtgctgcaatctttttttcgctttcttaactatgtgctagtcacgtgattacatcgctcccgcttcgatttttcctctatcgttttatactcaagcactctaactactactattacctactaaacaaaatttttcaaaattcctaacatttttcatactctaccgttccttctcctgttcgtgccaatagttccaacacgtgacatatctcgactcttgttcctatttttttctctatctaactcagaaccactatactctctctaaataaatctacagaactacacagaaccagatctaaaaattcttaaaaaaaatactgtaaagacttttctcaaactttttcgcaaccattttatcaggtgttacccggacatcagtctttgcaagaaatgtaaaactcctctaaatactagttagcacctgccaactatcacttagaggagattgtgttgtgtaacacaaacaaatcggacaactgaagcttaatctcagcagatcgtaacaacaaggctactctactgcttacaatactccgttgtacatttaagtcgtttgcaaaggatttatccccgcgcattatgacattgctattcgccggcaagcacacaaaacctttccgttaagtgtaccattgccagcctgctatggttcagcgactcaaagagccttattcttatccaactaaaatgtgcgaggcaagaatcatcgctttctagcatggattctgacttagaggcgttcagccataatccagcggatggtagcttcgcggcgttgcctgatcagacagccgcaaaaaccaattatccgaatgaacggttcctctcgtactaagttcaattactattgcgataacattcatcagtagggtaaaactaacctgtctcacgacggtctaaacccagctcacgttccctattagtgggtgaacaatccaacgcttaccgaattctgcttcggtatgataggaagagccgacatcgaagaatcaaaaagcaatgtcgctatgaacgcttgactgccacaagccagttatccctgtggtaacttttctggcacctctagcctcaaattccgagggactaaaggatcgataggccacactttcatggtttgtattcacactgaaaatcaaaatcaaggggacttttacccttttgttctactggagatttctgttctccatgagtcccccttaggacacctgcgttatcgtttaacagatgtgccgccccagccaaactccccacctgacaatgtcttcaacccggatcagcctctaaagagaccttaatgctagaacgtggacgatgaagtccagctccgcttaattgaataagtaaaaaaactatagaggtagtggtatttcaccggcgccgaagctcccacttattctacaccctccatgtcttttcacaatgtcaaactagagtcaagctcaacagggtcttctttccccgctgattctgccaagcccgttcccttggctgtggtttcgctagatagtagatagggacagtgggaatctcgttaatccattcatgcgcgtcactaattagatgacgaggcatttggctaccttaagagagtcatagttactcccgccgtttacccgcgcttggttgaatttcttcactttgacattcagagcactgggcagaaatcacattgcgtcaacatcactttctgaccatcgcaatgctatgttttaattagacagtcagattccccttgtccgtaccagttctaagttgatcgttaagcgtgccccggacggccgaagcctacctaaaccgtctacagcaagatccggtagcggtccgttcaacacaaggaagaacagtccaccaccagttccgctgcgtctggtaaaggcccaagacacccgatccttagagccaatccttatcccgaagttacggatctattttgccgacttcccttatctacattattctatcaactagaggctgttaaccttggagacctgctgcggttatgagtacgacttggcatgaaaactattccttcctgtggattttcaaggaccgtcgtaagcgcaccggatgcaacaaaagtattgcactcttccagccataagaccctatctccggataaaccaattccagggtgataagctgttaagaagaaaagagaactcctcccagggctcacgccgacgtctccacattcagttacgttaccgtgaagaatccatatccaagttccggaattttaaccggattccctttcgatggtgacttgaaaaatcaaatctttgaaacggagcttccccatctcttaggatcgactaacccatgtccaactgctgttgacatggaacctttccccacttcagtcttcaaagttctcatttgaatatttgctactaccaccaagatctgcactagaggccgttctacccagctttacagcaaaggcttcgtcactgacctccacgcctgcctactcgtcagggcatcatatcaaccctgacggtgaagtataagtaacacgcttgagcgccatccattttcagggctagttcattcggccggtgagttgttacacactccttagcggattccgacttccatggccaccgtccggctgtctagatgaactaacaccttttgtggtgtctgatgagcgtgtattccggcactttaacttcacgttcggttcatcccgcatcgccagttctgcttaccaaaaatggcccactaaaagctcttcattcatatgtccacgttcaattaagcaacaaggacttcttacatatttaaagtttgagaataggttaaggtcatttcaaccccaagacctctaatcattcgctttacctcataaaactgatacgagcttctgctatcctgagggaaacttcggcaggaaccagctactagatggttcgattagtctttcgcccctatacccaaattcgacgatcgatttgcacgtcagaaccgctacgagcctccaccagagtttcctctggcttcaccctattcaggcatagttcaccatctttcgggtcccaacagctatgctcttactcaaatccatccgaagacatcaggatcggtcgatgatgcactcaaaagagctctcacctacgttcactttcattacgcgtacgggttttacacccaaacacttgcatagacgttagactccttggtccgtgtttcaagacgggcggtttaagatcattatgccagcatcctagtcaaagacgcagtcctcggtctagacaggcagtatcaacaaagtctataacacaccaccgaagtggtgccacattccaatgtcattatcctaccgtccaaaccgatgctggcccagtaaactgtagaggccccacccgaaagcaagacatacaaaataccaagtctgatctcaaacccttccctttcaacaatttcacgtactttttcactctcttttcaaagttcttttcatctttccatcactgtacttgttcgctatcggtctctcgccaatatttagctttagatggaatttaccacccacttagagctgcattcccaaacaactcgactcttcgaaagcactttacatagaatcagacatctcatcgcacgggattctcaccctctgtgacgtcctgttccaaggaacatagacaagagctgactccaaagttaccttcttcaaattacaactcggacaccgaaggtgccagatttcaaatttgagcttttgccgcttcactcgccgttactaaggcaatccctgttggtttcttttcctccgcttattgatatgcttaagttcagcgggtaatcctacctgatttgaggtcaaacttgtttgttgttttgtaaggcaaagccaatataccaaaaattcaccgccagaagtctcaacgagttggataaacctaatacattgaaatattctgtcagtactatttagtaccactcgtgccaatacttttcaagcaaacgcctagttcgactaagagtatcactcaataccaaacccgagggtttgagagagaaatgacgctcaaacaggcatgccctttggaataccaaagggcgcaatgtgcgttcaaagattcgatgattcacgaaaatctgcaattcatattacttatcgcatttcgctgcgttcttcatcgatgcgagaaccaagagatccgttgttgaaagttttgaagatttttgaatttaatcaacaaattgacaaattaataaaataacaattcaataaaattgaagtttggtaaacctctggcccaactcatttctgagccagaccaaagcaatagtttctaataaagaaaacactgtgtgtaaggttttttcgccgcgcagttaagcgctggcaaaaagaatactgtaatgatccttccgcaggttcacctacggaaaccttgttacgacttttacttcctctaaatgaccaagtttgaccagcttctcagttccaagatggagttgcccccttctttaaaccaatccggaggcctcactaagccattcaatcggtagtagcgacgggcggtgtgtacaaagggcagggacgtaatcaacgcaagctgatgacttgcgcttactaggaattcctcgttgaagagcaataattacaatgctctatccccagcacgacggagtttcacaagatttcccagacctctcggccaaggtataaactcgctggctccgtcagtgtagcgcgcgtgcggcccagaacgtctaagggcatcacagacctgttattgcctcaaacttccatcgacttgaaatcgatagtccctctaagaagtgactataccagctaaagctagcagcactatttagtaggttaaggtctcgttcgttatcgcaattaagcagacaaatcactccaccaactaagaacggccatgcaccaccacccacaaaatcaagaaagagctctcaatctgtcaatccttattgtgtctggacctggtgagtttccccgtgttgagtcaaattaagccgcaggctccactcctggtggtgcccttccgtcaattcctttaagtttcagccttgcgaccatactccccccagaacccaaagactttgatttctcgtaaggtgccgagtgcgtcaaaaaaagaacaacacccgatccctagtcggcatagtttatggttaagactacgacggtatctgatcatcttcgatcccctaactttcgttcttgattaatgaaaacgtccttggcaaatgctttcgcagtagttagtcttcagtaaatccaagaatttcacctctgacaactgaatactgatgcccccgaccgttcctattaatcattacgatggtcctagaaaccaacaaaatagaaccataacgtcctattctattattccatgctaatatattcgagcaaaggcctgctttgaacactctaattttttcaaagtaaaagtcctggttcgccaactcccaaaaaggaagaaggttagccagaaggaaaggctcggttaggtccagtacacaccaaaaaggtggaccggctaaccaagcccaaggttcaactacgagctttttaactgcaacaactttaatatacgcttttggagctggaattaccgcggctgctggcaccagacttgccctccaattgttcctcgttaaggtatttacattgtactcattccaattataagacccgaaagggccctatatcgttatttattgtcactacctccccgtatcgggattgggtaatttgcgcgcctgctgccttccttggatgtggtagccgtttctcaggctccctctccggaatcgaacccttattccccgttacccgttgaaaccatggtaggccactatcctaccatcgaaagttgatagggcagaaatttgaatgaaccatcgccggcacaaggccatgcgattcgaaaagttattatgaatcatcaaagagcccgaaggcattgattttttatctaataaatacatcccttccaaacagtcgggattttaagcatgtattagctctagaattaccacggttatccaagtagtaaggtactatcaaataaacgataactgatttaatgagccattcgcagtttcactgtataaattgcttatacttagacatgcatggcttaatctttgagacaagcatatgactactggcaggatcaaccagataactatcttaagactgcaaagcagtctcatcaccagcccaagaactgacgttctcagactgacaagaagttttctaaattgacaattgaataaattcaatcggtatgtgctcgcgtctcaagtttttacgctcgagtcgcaaccaaatacatccatatagccctctttgaattcccctggtatgatgtccgcaaaacactcgagttttttacaacacgaggttttacataaccaaccatggaggaggttacacttggcaaaatcacagaacttaatccggctatttgtcaaggcagacccccaaataagttttaatgaatgtttgctatcagctagtaatccactaaatccttcagcgctcatacatagaatcgttagatatctagtatgagactgttcaggttttcttgcacaaggcaagatcacccatgttgtcatagcgtaaaaagcaatgccaaacttacgttcaccattaaactctctccacttaacaacgaggccataaaaacaatgttactacaactcattatctgaattgttttacaattgtttcatgctttcgcatgtaattcctcccagcatatctctgctgctttctgatccgccacctctattccctcgcgcaaactaaaagtatttcttctcaacttcctcaagggaaaaagttttttgagacgtaaagatttgtgcgagtaactcatcacagtatcaatttaaacttaatctttttttttatgcaatgacttggtcgcatttcgccagttcggtctttttccgtccaaaatattttggctaccgcacacgacctcttcctctgccacccaatactgtcccacctctacctttcacttcctgctgcccacctattactcctatacacctccagcttgatccatagtcactctgctctggtgcatcctcccatcttcgtctctctgtctccttctcactgtcctgttctctccccactgctcattgcttgtcaatactcttctcttcacactccaatcgccaacctccatctccatctttcgtagctctcccccatatccttatatattctttttactttcattcccattcgctcttcattctccttctaccttctacccatatttatgtcattcgcgttcagttcgcactatgttgcaaaaatttttctgcctaacctgctgaacacgctcatgcacattcctttgtttgttattctcgtttgcaaccgtgttttgtgtcaagcctcgcttgcttccatccatttccacttcgtctaacctctgcttataaatatccaccttgtccacctccttgttttcctgtagcacaatcatctatgttccattctttgtcacatttccgtcaattttacaaatataaattatatttcttccactcctctatccctttctctatctctgtccagtaagtgcccgtaggtttgtgtaggttcctaatcatacttaacacacctgaatccccaaatatatggtctgcccccttcatttttctttttttttttgacgaaatggcatgtattacgactaaagtctaacctatctactacaaagtatataaatcatcctctaatccataccgaatggtggaggaaatcctaggataaaaacctccgagtgaaatcacctaaaaactaggtgatatccttagaaaactgtagaaaactggacaacggtatatgctaccggacttgtaaaatgtttaaataagacgtctagactgcaaaatcgatacccaagtagaaagtgttgacagagagaaggattccctgtcttcactgttccgccgtcgaacttgaaataagtagacagtaaggaagtatcgatttagagaaagtaaagcagccacgggaagttcaaacttaccaatgatgttgtttaaatctaggttcataccttcaggccctaacaaattccaaaacgtgcggctagcctcacagtcttggtaggtatgatgaaagtatttccgtctttcaattgagttgaggcacattacacaatcttcaagagcctccggattgccctggcgttcgcggtgaccaaggtggaccctgtgtaattcctctgtccctttgggatgaagaagttgtactttataaagagccttccaaaacttggggtaattgtcctgtagcaggggaaacttttgaagtagcgtactggagctacacaccggtgcttgttgctcatatttggctgatctacgagtaaatgtcatgcgatcaacacggctggtgatgtgtttatcccagtccagctgaagtggcggattacgcaccatctcttgtttctcgttaagcgtgaaaggctttttaaaatatgaattaatccaaaacctcctacccctttcatccgggatatggtagcggtttttcggcttaatgatggtaaaccatgcttcgagccatgctatttcggctctggtgaattgagtgtaggtcttgtacgctgacattgcatgatctttgttttggaccgcgtagttcacaaggaaaaggtaccacggtacgatgtcccatttcaggggatcaagttgattgcgtgtcggagggtaaattgtatcaatgaaggattgaagtttgtcacggagaactatgagattccaatccaccagattcgtcaacgtttcgtagataacttttgcccgtcttcctaagagctgttgcttgacattgaggagtccgaagccccctttctttttcaagctactaaggtttctgtcgctaatgcgagggagatgtccctttaccatctttttgatgtgcttgatattgtcatttgccatgggatcatgtaggtctcggaagtaaattttcgagaagatgtaagtattgaaccccgtgcatctgagatgaattggcaattcttgtatggtgtggaaatgtagctgtgtggaaagagaggagatatacgaatcccatctgaagccgttaagcggaactccgaggtatttgtagtcagtggtgctaatgtcaaggacttcaaagccaaggatcttggtaacatcttcgggaggtgactggccccagtggcaggttcgggacttggcgatactgaccaacgagttggatgcttgttcaaatagagtaagttcttctttgagaatttcatgatctctggttcccttcacaaaaactgtgagatcatctgcaaaggctgaatatttcgctgttagcggtggtagatggtcgagttgaatcggaattccctcgagccgactctgtaatcgttgtaaaagaggctccaagcagagattgaaaaggataggcagcactgggttgccttgtctcgttccctgtttgagtggaaaggtctctgactttgtgttgttggtaaaaatggctgcaaattgttgtgtcgttaccaggagcaagatccgcttgaatctggggccaaagccaagttggtcgagtactgcagacaaatagtcgtgcgatatccgatcaaatgctttagtcaagtccaatataatgacatttgcacttttcagagtctcggggtcttttgatactttgtcgatgagggcccggaaccgttggatttgaaagtccatctggcgttcgggcataaagccgcattggtcatagccgatgaggtccttggtcaccttttgaaggcgcatattaaggacctgcgaaatcacccttaaagaagtattaataagggagatgggacggaaatcatcgaccgtgaggtccttacgttttctcttgggtatcaaacggatgagaactagagccattgactctggtaatattcccgtttgcatgatattctccgcgtcctttgttaatagtgggcctgccttgtcccagatagcctttaggaaaagataggtcactccatcttctcctggcgtggagctgttggcagtccgctgtaatccggacgtaagttcttcatatgtgattggcttttcaagctccacactgtcgctggctgatactttgcgacggaacagctgtacatacctcctaatggagagtttggcttcttgggcctgggaatccaggtaaagcgctgcaaggtgttctcgttgtatctctagtatatctttggttgtgatggcggtgcgagcccgatctgcggttgtgagtgtactcacaattgttgctgcatgggttgcccctttgaaccggtcgttgagatccttgaagatcttcggtggttgcctctcttctatttgggaagtgaccgactgttgatttctaagatagcctattattctaggcaatcgttttatgaatgcagtgtagtcggaaaatcttgtttgttgtaagatactgaagagatgtgtgttgtctagccagtggtcctttacgatgaagcggggttttctgatttttaaggtcgcttttggaaggataataaggtctatttcaactgttatatgagttgatgagattatgccttctttgtgttgatggtatcgccaaaccctgtctttaagagacgtggggagatagatacgatcgaggcggcgacaatttcggaaattgtcattcgtgaataatttgatttgaggatcgagccctctgagagtgtcgtggagttgtaagccatggaagatagcattgaatgcatcgcgtgatgcgacttccgtgttttgtccgacgtgaaaggagtcaatttcagggtcaaggaccatgttgaaatcgccccctaggcagacgtggaatgtagctcctgcgttgtttagtttgaagctttgggtgatgatgtcaatttgggagtgtaatgaggtaaacaacttggcctgagccggatagttcccgcttgggccgtacacggatattatgaggatgtattcctctttctccgttagtttgatgatggcgtcagttgcatagggagcaaggtcggcgtctagatcaaggttgttacttgatatttgctggaagtgggagtactggagatttaagattatcccagtgcgtgatgaagtgttggtgtagattaactccttttgggagtctttcaatgtattcaggagcccaagaatccattccggtgtcaaatttggcagcgaagtagaagaggtttcctggaacaggttgttgtagtttaggttttgagagtggaaaacagtttcctggatgaggagaatgtcgcatttatgtgctagttctcgaattttcgcaggatcctggtttcgttgaatgttcttggatctaatcgttattaagttgttgcgatgattcacttccgatgcctttaaggtcggattggttatcgccgtatctagtagattactcatattaataatctattgtgttggaggggttggcttcgtgtgagccaatcgtgacagttaccggttgatgagccaaattagtatggtcaacaatgtcctggtgtgtacttggagagtcgacttgtgttgggtcgacgctttgactttgaaatcttagtgaagggtcagatctttccatgttgtccaaaattgtggattccggttcccctagagtggatcctagtggggaatccgtgatatccatgactctggcaggaggatctgttattggcggaggatctcgtagtgttgggatgcggctggctgaggtgttttgtgcctgcagttcgtcgcggcttaaactaagagtcttattaagtgcttcatgcaccctttgggactgtcttagagtctgacttttgttggagtgggagagtcctataataggagagtaaggggtcggttgcttccttgtgagaggggctaggcgacccgagtaggatggtgaagagattggggttgctaggggtttggtttttgatgtgacaagggatttaccttgctttcttgggcgaggcgtgattggttgaaggagcggttgtgttctggtcggtttgttgccagcggcattgattgtagtttctgggaggagctccatttcttggtcctgaacctggtggctaaggatgacggatgcttcatcgtcacggatatcttcatcttcgtctgaatcggtgtatcttactgtttcgtcatcatcatcttggatgtattccctttggatttgatcttgtggtctctcgttgtttgaggtattgcgaggtacccctgtagatttagggtgcatgatagctctcatggtttggtgggagtcaggttgtgctgactggttatggctcacgtgttctgttactcccgattctgggaggtcggcgagtggcgcgaatcgattacctccttgtctatgttgggagattaagggttgtggttcctttcggcgtggagcgcctttggtcaccgggttaaacccatcgtcgtccttttgatgttgtttgtatggacgtgcgttgttgggggattcgttctgataaaaatagggtacctttgcaaccggggccttgaatgttgggcatcgtttggttgagtgctgattggtgtgacatttgaaacagaattggtatgaggagataatgtctagttgtacaccctgcatgaaggcgttctttctgtttggaatcctatccgattccgtcgcaatcaaatagaaagcagactggaatcttgacagagtcgatctgcctttgtggagtggtacttcccttcggtgtttagctagaatatcgtatacgataggctctcgttcttccctgcgtaaagacctgtattgaggtacttgatacgtgtcaagcgtatttgggttgaacattgcttctaatagattgtctaagtttttgtttccaattggggcttttatacccacaagaaagacgttgggataactagaaagaggaataagtttaagtgtaaatctgtagttgccttcttcccctgtgtagtaagggtcgaatatttcttcaaatttagtcttcagccatttctttggaccttgagatttgaagcgtggaactacagtattactttcagtaatggagaagttaaagtttaagtgcagattgtcccggatatgtatgtggaaatactcctttatgtcataaatcctttgagtgatttgaagtgttttctccaactcttcaatttcaagttgggtattgttgatgccccgcttcaactcctgctccagagggtcccctggggatatctggttttggtaaaattgaagtgattttttgagactggcaatactctgctcggtgtgttcttctaactcatctaacctatcaggtatagtctccttaaagtgggtaagaattatcctagctttgtcctcgatgctcatttggggttttaacaggttcagtctgtattcaaatgagtcaatgtggactcttacatctaacttttcagcaacgtttctgccgattgtgctgagggttgacactcttacctcctcaggcgtatcccagtcgtcgaaccttttctgttggcccttatagtttgcttccgataacccttctaagtgactgataagtgtcgagtatgtgtcaaactggtcaaagacttcattggtggtaggaacgtccatcttcatctgttcttggagggcctccattttcagtctgtatgtttgaagtattttgtcggattctttatcgggaacatcttgaagaatatctgcccattttgccttattagggtttggaagaggagtagatctaattgccttggggtttgagggatgaatccttttcttagaagaactctttgaggttcctaagagtgggtattcctctgcttcaaggtcttgtgtatttttttctgggagttttgtattttcggagtttttttggtttttatttaagtattgtaaggattcagaatttttttgggtttttgtattttctttaagttggtgtacaaggagagaatcttcttgttcgggcaagttcgagaggctggttgtagaatctaaagaaatgtgatccatttcattatcatcgtttgcagccatttcctggtcgtgtacctcgtcaagcacgtgactttgaaaaatttccgaaactgaggtttcaaaactttccatagtaggacttaatggggtctggttctgaataaccagctcgtccatgggattatcccgtagttgggccggttcctcagaggtagatgacactgcagtcacgaaggatggctctaaattgccgttttcatcggcatctgtggactcgccatcgaggtccatcagatcagggggtgcgacatggtcgtgtggatttcggtcaatatccggtggttttggctcgtttaaggcttgatttgaagagctttcaccagagaaaacccctagaggtccctctggctgattgattggtcgtagttctgacatggaacagtttttcccaataatgaaccatggaccccccggtttccatatggtgcgctggaattttatgtatttcggttgcggccatatctagcagaaagcaccgtttcccgtccgatcaactgtagttaagctgctaagagcgagaccgagtagtgtagtgggagaccatacgcgaaactctcgtgctgcaatctttttttcgctttcttaactatgtgctagtcacgtgattacatcgctcccgcttcgatttttcctctatcgttttatactcaagcactctaactactactattacctactaaacaaaatttttcaaaattcctaacatttttcatactctaccgttccttctcctgttcgtgccaatagttccaacacgtgacatatctcgactcttgttcctatttttttctctatctaactcagaaccactatactctctctaaataaatctacagaactacacagaaccagatctaaaaattcttaaaaaaaatactgtaaagacttttctcaaactttttcgcaaccattttatcaggtgttacccggacatcagtctttgcaagaaatgtaaaactcctctaaatactagttagcacctgccaactatcacttagaggagattgtgttgtgtaacacaaacaaatcggacaactgaagcttaatctcagcagatcgtaacaacaaggctactctactgcttacaatactccgttgtacatttaagtcgtttgcaaaggatttatccccgcgcattatgacattgctattcgccggcaagcacacaaaacctttccgttaagtgtaccattgccagcctgctatggttcagcgactcaaagagccttattcttatccaactaaaatgtgcgaggcaagaatcatcgctttctagcatggattctgacttagaggcgttcagccataatccagcggatggtagcttcgcggcgttgcctgatcagacagccgcaaaaaccaattatccgaatgaacggttcctctcgtactaagttcaattactattgcgataacattcatcagtagggtaaaactaacctgtctcacgacggtctaaacccagctcacatttttgttcattgcatacttttacgttgtgcttgaaaaaacggggattactggtcgcttagtttcaatgtttaatagcattgcttcttcagctgtgggcagccttgtgtttttatcaattattcctctagcgttttctttctcggttatgacgttcttgaagagctagacgtgccacagtagattctctacttgaagtatatggtatttttgaaaaatgtatatcttattaaacctagaatgtaattaagatagtaaaaaggaatttgtttcaattgtgaaatgctagaaaggatcgaaattccaatgacaatagtattagaagcaagggagatgattcaaaatcaaatatctatcctctttcaaatcgttaacgacatttctcaatcgtgtacaagtgtataagaccgcttctggtatccataaaccactcgaatttacaaatcgtagctgaattatcacatacatatattctcctacatttttggtgtaaacagtactacatgcatctgcaaatacaaatatgaaagtgaaagatcatggcaaaatcattggaaaaaaaaaactagagatattgcggtgtgggttacttggtccgtgactctcaatgaaatcacttataatggccacgaaacaactgcactcactaggtgtgatcgtcattctttccaccgctgacacatgtaccacttgagctatctccacaacttaagttgcttggccaattaccatctggaccaataagcaaatatcccttccaagttcctccgtgggttaactccatgcaccagatatggtcgtagtggcttttaatataagttctgtaagccttatctaatgaaccttcgattgttgattcttgtgctgttgaactacagtctccaccagaagaagaatagacataacgcatcttacgagaaggagtatcaacaacatgatgatgaacaccacaatttttgttgtcagattcgtattttgcttcaccagcagccttgtggaagacagcataccatgcagctgcagcagatgctccacttgcgaatgctgaggcgacgctagcaacaccaagagcacaactcttgacattttttcgttcttgaagccctccttttggaacccaatcgaagcgatgatttgaataatcgacaatggtatcattttctaagttaatagagaatgctggagcaaacgtggtaccttcttcaatgtcgtcaatatgaattcctaagatggcaggcgacatcaaaagaattgataataagctggacttcaacatttttctttatttctgtgatgtacttttcctagaaatagggtaatacttaggaatcaaagaaacatatttttattgaaatatattctatatttataataaggtgagatactagaacgtatttgcattccttcatcaaatttcattcaatctatgctattccgcagaatgtgccaagaaattgattaacagaaccaaaaaattaattgacagagccaagaaaggaaaacaattctccgcaattctggattacatcaattgctgcagcgctaatccttatttcgtctagttgagaaatacgaggcagtctacatggtaacgcgacagagttgatgcattgttgtcacacgatgcaaaagaaatgatcccaaacggagacatccagagtgcctatttgtttcatgactaaattattgtactttgtaatcaactactatcacattttttttgattcaattggccaacacataaatttgcatagcataaatccaagatttctcttcgtctttcgtgaacaataccagtctcttgctcatgtcgcattgactgttctgtcaaaaatgtaccatttttccgaaaagtgaactttcgagcaattctgaatatcaagagcaacaccagagcaatgcagacgtaaagcttcacctctaactttataccttacaaagctaacactattctgtagggggccaagcctcttcattcgtttacaggaaatatttttaagtttaacccacctctgtaaactcaaaatgtcgaggctcatccttgcatatcacaattcattgtgacaattttgccaacttttatatccgacatgacataccccagttgtattttatgtagtattttgttcaattagaaaaactttttttttaaaaaaaagaatatgcctggctcatcatatgacgttttctctttccagaagattgctcaagactttctgagaacatacttaatcaatccataagcgaaattaaaaatatcatgctcaaactaacggcaactgcttctttcctgcaagcatgaaagatccataccgcagaaagcattccttctatacatgatgaacaaaatggtgcacgcgatatttctttcatatatgaagtactggattctcttcttttctccctactctttcttcggccactatttctttttgctttgactacatatcctccaatctacttcaaagaaccaatcatgtcgtcaatcactatttttggactcaatgagatcacagatacttacttgaaagccaccacgggtgttgttttaggtctatacatcaacgttttgattccatttttgttcattgcatacttttacgttgtgcttgaaaaaacggggattactggtcgcttagtttcaatgtttaatagcattgcttcttcagctgtgggcagccttgtgtttttatcaattattcctctagcgttttctttctcggttatgacgttcttgaagagctagacgtgccacagtagattctctacttgaagtatatggtatttttgaaaaatgtatatcttattaaacctagaatgtaattaagatagtaaaaaggaatttgtttcaattgtgaaatgctagaaaggatcgaaattccaatgacaatagtattagaagcaagggagatgattcaaaatcaaatatctatcctctttcaaatcgttaacgacatttctcaatcgtgtacaagtgtataagaccgcttctggtatccataaaccactcgaatttacaaatcgtagctgaattatcacatacatatattctcctacatttttggtgtaaacagtactacatgcatctgcaaatacaaatatgaaagtgaaagatcatggcaaaatcattggaaaaaaaaaactagagatattgcggtgtgggttacttggtccgtgactctcaatgaaatcacttataatggccacgaaacaactgcactcactaggtgtgatcgtcattctttccaccgctgacacatgtaccacttgagctatctccacaacttaagttgcttggccaattaccatctggaccaataagcaaatatcccttccaagttcctccgtgggttaactccatgcaccagatatggtcgtagtggcttttaatataagttctgtaagccttatctaatgaaccttcgattgttgattcttgtgctgttgaactacagtctccaccagaagaagaatagacataacgcatcttacgagaaggagtatcaacaacatgatgatgaacaccacaatttttgttgtcagattcgtattttgcttcaccagcagccttgtggaagacagcataccatgcagctgcagcagatgctccacttgcgaatgctgaggcgacgctagcaacaccaagagcacaactcttgacattttttcgttcttgaagccctccttttggaacccaatcgaagcgatgatttgaataatcgacaatggtatcattttctaagttaatagagaatgctggagcaaacgtggtaccttcttcaatgtcgtcaatatgaattcctaagatggcaggcgacatcaaaagaattgataataagctggacttcaacatttttctttatttctgtgatgtacttttcctagaaatagggtaatactcacgatgcaaaagaaatgatcccaaacggagacatccagagtgcctatttgtttcatgactaaattattgtactttgtgaatcacaccgagcatagttgagtgaaatggtgagtttaccacatcttttgtaatttcagaacttcttatatgtccatgtccagtattatgttgtggatcacatagatggaactataatatcaaatagcacacgactctccgcatgaacttatgtccatccttaaatttcatcaaatgcattgcatttccagtaatactcagtttcaacatgatagacacaacggtataaacctacggcgacaaaattatagagctctacataataaccaggttaagttttatgacctcttggtaataagatagcacatctgcggggggctgcggttgctattgggttagaagttcgatataaaatcattgatgtcgtcagaatttctggttctgacaaagactgagctaacatttgggcatggatcaaatcattcggtacaatacgtccactttcaatatattgttgatatgtccaaggtattataactccctcaatagcttcatcatctgcgggtacataggcgcgactgctatctaacggttcagaattcaagcttgagtctgaagaatcattacctgaagtcacaggatatccaagagactgcaatgagaataagaataatgataaaataaataaattcatgaattgactcccatctaacgtacttggcttatttcactgaaatttcctctactttatagatttcagacacaggatctttgaagtaacagtttccgaggttactagcctcagattggattcgatagacatccgagacagaaattctacatttcttttgttgaataacgcatcaacttatggagatgagatgaatatgaagaatatataaaacccagaggattccctctttttaaacagattttaaatagttctccagtgattaatacaagtccatatccattaatccaaaaagtcccaaaggaaaaccggtctctttctatatacaggtttcccgtcaatggacttctgtaaaaaatggatttgggccttatattaatcacagaagatcttttaacttctgtttaaacttgagggaatcccatgggaattatatatctttcttgttatccaattacttgagagtgtcaacaatttgtaactggcaaacgccaacattccaacattgaacatttagtctctagtacatgatcacgtaggtaatcaattgtaaggcagaaaatttaatatctatttcaaacagttcaattcactttattacattagatattaccgcaatttaaaggacagtctaaaacagaagaacagttcgttcatatgtagacccatagtatccgtcatctacaagtcaaagaaagaccactagtttgcaaatcccccttcatgcaactattgggatgtgattgtcaatagagcagcgcgtacgcagagaagttcaagaataaaagttatgactgattttgcacccattaccaaatgtctagcatacagtgttgcagataataagcttagttttagagaccacttcgactgtatacaactgtccaagaagaggggttggccaaagaccagctgtgtccgcaatcacgatgatcttgtgtggtgactgccaaggggaacgacatatagtgaaatcaagattgtctgccaaataatgcctttcaaacgaccagacatacggcaccggtgagcaactccaaaatggaagtggtgcgacaatgtggaatcatgctcactttcaggagctgcaatggccgacacaagatccataccgcaaatgaaatggtaggaatgccaaatgtgagacatctccgctgtgtgcaacaagttgagaggtgatcatgaagcaaagttagtatagacatggtctgtgattttctgtatgggtagggacatgaaccatagtagcagtgcctttatgtgatcctggcaaggctaaactgtaaaccactaaaactgactcgggccatcagatgataacgagagatatgacgcagcactgtctgccggatctgtgtccgggctcgcaatcgcaaatgaccccacactccctcccttcttgaagctgcttgttagacctccagattaagcaatcagtgaggtgagccgcttcgcattaaaattgtctagatctcatatacagattctcccagtttgagttggtcttctcctttctttcagttcactacaagattctttttgatctattcctataacttaccgactgtgctagactgaaagcctcatactggaacgtctactacagcctgttatcctccgtcgtcatcaatagtcatttcggtagtgccatagccttcttctccaggctcatctcgatctctctgatcctcgggctctaaccgcacacttcaacttctacttcatcatcacgaacatcatttcgtatcatatcatcatatcccgttgccagagtcctttctgcgtcatcttttcttaggatcttgtctcaaatcatcgattcatagcttcaccgctgcacacatcaccatatcattattggccatttcatagcttctccggattaccctttgtctttgatcatcccttgattcatacttcataattgttaattgataattcataacttcttcgtaatatccgaacacccatcattatgacaagagatttgttgccgcctgctcccaaatcaagacaccccgtagtgcccccacatcgggaccgtctcagaaatgggcgctacaacagatgtttccaaaactactaccatctgtaccagtacttaacgaccaacccctactacatccccagcgtccgcccgctggtcaaccactggcagcttcgggacctccttaaatacgacgcaccctccaacgtcgtctattacaccaaaaacgactctattaataagttggacatgctgctgtttgtgctgtcgagtcacgtcaacctccactactacccccgctgctactcccatgctcccaacggggtagtcgtcacgggcggcttgctcacgaatagcagcaagttgtttctgatgaatatcgataatttgctgcttctggcactgccccaacctgctggaactccacggaaaatctccaagggtttgtttctgttctacaaccccgaacttgatgtagccaaaaccgtccgtttgggcgagatgatcaacaacgacgtcgccgtttacccagattccaacagcagctacagggcatatgtctgcaataatgactccaatttgtactgtgtagatattcccaataatgatggcttccgaattgtgaatcgaatcaactgtgaaatcaacacttgtttgaacaatgtcgttagatctccaaccaacgacaagctacttgcggtaaccggcgattcactgtcaatatttttgcttgaccccacggctctgaatcccaacgttcgcacaatcaaaagtggccacgagtcaggctttggaatagcttaccatcccaatggtaatttgctctctacagtttttcaggatggtacctgtttgctatacgatctcagaaatatttcctacaacaaaccattgatcgagatcaagctgacgagacctggccaccagctgggagcattccgggtatgtaagttcctgccagcatacgacgtgaacgatatgctcatcattctggaacacgtaggcagagttcatttggtggatttgcgccatttggactactcaaacgtagatgaccatcaggttatggtcgttccctatgccttggaccaatatggtgagtataagggaggattcgacaagtacaatgcgaaaatggcagccatcaatgcagacaaagaagaaaacgaaaatgaagacaatcaaagcagtaagaataatgatactaataatgatagtgaaaatagtagtatcaattcttcaaagtcgatccataagcctgttgatatctattgtaattctgattcgaagctggctcagttctcctcgttcacgtctcccttggtgtttgactatgactacttgaccaacaccaatgacaagttgttcaaggactttgtgtacacgcctccgccacaaccctcgcctccactgaaggaccactaccttcttccacccaagttcaactatcctcaatgggataatcctctcatttctagtagtccttgtaacaatcctgtttcacctacatcttcgcagagaaactcgatagccaacacattcggtagtagcaataacatcggtagtaacaacgatgacgagcttcagcagtcggatttcgacgataccaacccagatatcgatgctcagttgaactacgtctacagcacaatgagcggcggtggcactttcgcatctggttctggttcccgtggatcagcatccacagcacgctcctcacagcccacgctcacggatacttattcccattataccaactactgcgacgattcataccaacagcagatcaaccatatccatggcgagatggagctttccgggatcgagttctgcactcccagattggccaacgagagctacatcttaattggatgccaggatgctggagtagtgatgtggggaatcaacggtgcggccagaagaagcttcggcagctatggatatgtctgatagcatcttgatgaatatttcttagcgaatattttcggtgtaaaggttacttatgatctaatagcatatacgttcttgtttctctttggttatcttcttcaatctacgtttgtaactcacagcgagttcaaggaatatttacaaatgataggagtatatcagtttattttgtagcgtgatctacaattatgttcttcttgtatcaacttcaacctcctatgcaactttttggctgcgaatcctgagcaaaaaaaatgttgattaagtgggggttataaatatatgtacaaagagattagaggtgatttatatatctttatgttttttttatagtttgggaataagtagtttatactgttgactgccacgccctgtaagtcagtttcagtaaatgatacagcatggacagcatgagtagtagggaataatccttttcaataaccaagagggaggaaaccgtttgaagacgtattgtcgtataaattcaaaaaaaatcgtaattcaattgatgctgaaggttgaaacatataggccatgacagttcatatatcgctgctttgaacagaacagatctgcagcgactagattgactctgtaaatgaaattgactatctatgggccaacaatgtttctaatctgaccaacaaagaccagaaatgcaaaaggaagctaaatcagaaatagcagttttagggagatttcagactatgctaatttagttttcagaagataacaaccactgctcgtaattacccttgactctcaacttgacatcgtcgatggcggcattttcagccgtcttgtcgttgatgtattgaatctccaaattttcgcacttcttgattgactcaagaatgatgctgccgtcgaactcctggacgttttcgagggagttttggataccgttgatgatgatcttcactctcttgaagttcaaaatcaagtctaaggcaatccatccttcggagtccatattctttcttaagaagatgtccctaagcaagttttctaacgagaagtagtagtcgatttgttgagtcaacgcttgctcagggtcttgtttaggtgagattggagggggaatctgcactggagctattgccacaggtacaaaatggcccatatgaggtggcatcaccatgccaccgttgcggtatccgttattctgctgacggtagtttctattgtttggtctgaactggccgttctggggtctgtacggacggttttggaatgtctgaaagttctggttctggataaatggctgcggatgatagaaaccgttctgaggcaatccctgtggttggggctgttgactgtacctcttgttgttgaactggccattattgttggtagtcgtattgttattgttgttaattgggttgttaaaacgtctgaagttcttttggttgtttacattgacctgaccaaacttctggaattgagggttgaactgttggtactggttgttgatgttgttcacatcgaagtcgccagcgttatcaggaacttctacagcagattcttcaccattgctggcaacttcttctgcatcatgcgcagcaacttcgtcttttttgacagatccattagctccattttgcttcttagcattggcaccactgtcaggagagcccgactggttggaagaagcatttttattcgtggaaccgttcgcgtttttctttctgtttctagtctgtttctggttgttgtttctggtgttgggcaagactaccttagcattcatgggcaaccattgtttggtgataggcttgatgaacttctgctgattgttcttgctggtgggctggttctcgatcttgtcaggagtaggccacttgtgctcgtcaacaactgaggagtctgaagcaagagacgtggttgaccaggcggacttaagcggaactggggctggagccaagctcttcttttccttcttggaagcgttaggagtagagccagcagatgtagaaggagtagaagttgccgagttggaggcagtagaaggttctgaatcaccagtgacagcagcagacacttcaacagtagaagaaatagaggcagtagaagcaggttcttcgacggtctcagtagaagaaatcacgatggaggaagcagaagaggcagaagcagcaataggaacagcagcttttgaagcttccagggaggttcccttggcagcgacattggcatatgagatcgtggaagccattattgttgatgctgttgataattcaaacgtagaattaggtatcgcttgtttggtcgtgaagtggaaaatgcgatatgaaaaatcgatttttcacagagtctctctttgatggatcagaaatttgacagatgcaaaagattctagggatttacggcgcgtagatggacggacgttgcagaactagtaatgaaagcttgataggtctggatcagaattggccagactgggagcttttgggagttctgaaatttttttggaaccgatttagttgtagagctgcaattatagcagagttaacagactttctggatggaaatgcggcgggtctgctggaatagacagttcttgatgggacagaaagcttggacaataggctggctggagtaagacactctgtggtggaagaatagtggagcaacagagagggaaagaaagaaagacgacgaaaagttgtacctctctgcaaaatttttttgctagtgccaaatttttttgtttttcgccctcactaggactgcacactgcaaaggcgagtgtgaagaatagagagagattggcgagagcagagaatacagaatacagaaagaatggggagaatggagaatggacagtctacttggaacaaacagatacatagaaaaagaaaacgaggatataagaaagggtttatacataatgggttgatttgtatacgtttggaaaaagagagatttcaaagactgctaaatatatgtacgtatatgcatattatattgagacaatttagtgagagaatgtcgctaggctgaggaggaatttgaccgtgaatcatgagcttttcccagatctgggtctagtttcttctggttttttcattcaagtaacgttctgttaatttcaccatcaacttgtaatatagtactagcgtctttctctctctccctccgactttctggcctgattagcggataatagtcgcctcggttacccaagctgtcactccggtacatggagcctctaaactctctgaagacagtaacgtccaccagcctccaaagtaccgcccgggcgtacatatgagcacgactgtacagaactttcaggaaccgattgcaacctctccaaagagttgtaactcgaggtgaaggtgcctaaacgcgtcgttatctgagagaaacaagaggcgaaagctagcataggcttctacaacgagctggcagtagcaaatttgcccgagagtttttattctgcgactcttttcttgaatctgacgatttctgcctcttatcgcattctggatttaagtcttaccaggctattcttaagtatggctaacttcccttcagtatgtgccaattcttaactatgggctttcaaaatggaaaaactctacacactacttgtgagtcttaactatgggactcgagagtttaacctatccgcactgtttatactctcttcctcggctcaggtaacgtgacccagctcaactcaaaaacatccacaatccttgaactcttgaccagactcttcctcatccagcactgatcacactgccattcacgtaagcgccgccaaatatatcactctgtacgagtctctactactcgtgaattgtgctagatcgttttgtccagcctttcacccttaactcgcgaatctcaccgttccctcgtcttccccgtatttttcatactaatctgctgccccacatttggatctgtgtttagatcttcaacgaatatcaccagacacgaatagacaacacttccttgtctctgcagtgaattgacacactaggcagtaccaagccatagcttcagttgtgttcacgtgtaggtccctatctcttgttcgtctgattgttccttgcgagtcaagaaccacacgtcagagttttcaggcttctcacgtttttcaatttttcacttttgccggaaaattttcaactagtttgattccaattttcagccatgtcgtcgattctaactaacccgctctaccgtcctcttctagagatcgttaagtcggcccggaacggtattgtttatggaggaaaaatcagatttctgcatgctttggtcatcaacttgctctatcgttctggacctcctttaccccgattgcgggagattcttcaagctacaaagaaccatgccgaagtattagctggttttgccatcatttacaagatttgctgcaaaattttggccagcgactctttcttaggtcccaaaaacggtaggcttatcaagtttttatcaggagcgtttggctcgtggatcgtgtactcgcagcactttggctacttccatcccgggataacccaccagatcacgttgtactgcttctccagagtgttgattgcagtaggaaagatactattggattcgtatttgggtcatgctcagcctcagttcaagaactacaacggtaacatcattctcttcaaggatctcacccccaaccaacagaaaaagttgaaatcagcgatatacaacagatcatggaagtattttgcagtgttcacctgggctctagtgatgctcatctacgactaccaaccgcaatacttgcagagctcgttgagacacagcatggcttacatttacgatgttgaaatggatacctggagcacctggaaggacttcataggtttatagagagtaatagtagattgcctggtgcacactaaaaatcatataaagccagcagtggagtctatgaataaatgcgtaatgactacagttgcaatagagtgtagattcagaggagcgagtagatatcagcgagccgccatttgtggaagaaaaagaatttgtagcagtatccaaggaaccgtatagtactaaagtcagactattgtatactatttaggactgtctaagaagcggaatatgagtgtcgtattttatgtccaaagtaatggttgcgaaatgtagaaatgaaaatgaaagcgtactgatctgcctctaaaattgagcagacagaactaccaataaagagttgactcattatccaaatagaaacagatatcccagcaagaacaggacggtgagtctgggagtagaagaatctggaagactgtgattacttaagatactgtgacgtgtgtaattgctgcggactacggcaagaaatcaaaaatgtaacacctttttccaaaagagcgaggcgaatagttaaacgaaaaggaactgatgttccattcttttctgctagagtctccattcagtattctacattcactacttttcaatctgtcaatctcgtgtaactgttattttcttcagcgtaatttttcattctttttgcaatacttttacaaactgccagtgctttactttttgccctttggctgcagccatgacactactgaagtgctgctgtaacccaccaataaaaattcctcttctacttttccgtaatttgattttccactgctccacattttgctactcttactgtttggtctgcttcttccaccttctatggctccactactcccgagccgagtctcgctttaagcccacgcactattttaaacaatgaagctctaaaactcagtataacctgcacacaacccacccaatatggacacgctgtttctccaagatttacagatttataagcgtcgatttttcactttttcatataccatttctctactcgagtccaattgatttgttccatactctttctacttcatacgctgtatacgtagtatattagttcccactatacgagaatatcagtattcaaactcagtgtattagttttcagtatttttctctaccagaattactactattactaataaatactccatctaccgctactacctagtacaatatatcatagaatgaagttctggaaattctcatcttctgtgcttgccacccttctcgctgtcgtctctgtccaagcttcgggaccagccgaaggcgacgctgtcgccgatccaaactccgctgtcgtaaagcttacggccgagacatacaaacagttccttgacgagaaccctcttgttctcgccgaatactttgccccatggtgtggctactgtaagatgttgggacctgaatacgccaaggctgccaactcgttgaacgaaaccaacccaaacatcaagttggcccagatcgactgtaccgaggaagaagaactctgtcgtgaccaaggtatcagaggctaccctaccttgaaggttgtctccaacggcgcctatgccgactacgatggccccagagatgccgccggtatcgccaactatatggtcaaacagtctttgcctgccgtccaagtgccagctgacgctgacgctttgactgctgctattgaagaacagaccaagccatatgtcatccaagtaggtgcttctactgactctgacgccgcttccgcctacgagcaagtcgctaaggccaatagaaacgactactctttcttctcagtggaagagccagctttggtcaaggaattgaacacgaagtttaccaatgttaaagtaactggcaagtccccttcatactacgtagtccatcctggtcaattggatgacgtaagagaatttgaaggcaaggacatcaatgctgacactttgaccctgtttgttaccaccgaagttgttccatactttggcgacatcaacagagacacctacttgacatacatgggttctccattgcctctcggctactacttctacaacactgctgaacagagagctgcttttgctgacgaattctcgaagttgggtaagcaataccgtggaaagatcaactttgtcggtttagacgctacccaattcggaaagcacgccgagtccatcaacatggacccagcaatcgtgcctttgttcgccatccaagacacaccaaacaacaagaagtatggtgttaaccaaaaggaaaacccagaaggtccatctttgaagacgatcaaacagttcgttgctgactacctcgacgacaagttgactcctatcgtcaagtctgaagatttgccaaccgaagaagaaaagaaagccaacccagttgtcaagttggtaggccacaaccacaacgaaatcatcgaagatgtctccaaggacatctttgtcaagtactatgctccatggtgtggccactgtaagaagatggctcctatctgggaagaattggcttccgtttttggctccaacaaggacgacgccaaggtggtcgttgccgacattgaccataccaacaatgacgtcgttcttcccttcgaaatcgaaggctacccaaccttggttttatatcctgccaacggtgaagttgacgaaaagaccggcttgagaaagccagttgttttctctggcgcaagagaattagatgccttcattgactttgtaaaggaaaatggtgcccttggtgttgacggccatgtattgaaggctgctcaagacaaggcagctgctgaagctgctcctgaagaagaagaagaagccgctgaagaagttaaagaagaagctgctgaagatgaggatgttgaacacgacgagttgtaagtttcctgaaatcaggctatagctttctgtataatgtcatgtttaaaagtgagtgcagtattgtaatataaacttgaatttgtattaaattgtaactatgttgtattcgttcgcttctttagctagaatataagtagatgtagagaatcaaacctattctgttagggcaagctttgataccattgctgtggttgggagatggttgcactatgcctaggagttaatttactattacgttgtcgtattcgtttcgttagctagtgtatatgtcatgtcatgttacgatagagtagaacaaatactacctagggctattttagtagtagtcgagaagtatttgtggccatgctcttggagttatcgcaacagactttttttataattagcctcttgtactagctccagtcggacggaccccatatcttcacataccgatcatcccccacggagcaccacaatttaccgtaatccttggatccatgtttggctctgcctccattacggttccagtctacagaattacacaaaccgttgtgtcccttgattcgagtgattagttggccggtatggagcttccagaaatagatatagccatcgtcggagccagacatcaccaactcctcttgatctgtatcttctacaagatatccaaatgctgaccgaacgatataggaactctgagaatgaccgatgaacctacggtagagaatgggtttctgtatattcttgccatcaccctgtgataaaccagaaatatcccatacctgtagctcttctggagccgagctcaagaggaagtattttccattgttggaaacggaacacgatgtcaaacgacctctgacagtgatagaggcaagtcttttagtagttgcttcctgattcaataagtctggaatcttgtagaagtggatctggcgatcgttgttggctgtgatcaatacctttccatctggagagatcgacaagtcgttgattctgttgaagttattttcgagctttttcttcatcgacgacttttcatcttgtttggacttggacttgatgccagctgaagagccctgctcctcatcgccaaacactacattgtcgtcttcttccatcataagaacgtcacctgatttggtttcgtcggttctcaacttggagagttcagcctcttcgccgtcaagttcatcaagaagctcattgtcgtcgtcgtcttcgatattgccatagaagtcgaatagttctactccatcgacatcaaacgccttcaacaccttatccggcagcccgatgatgaactgcggtctggtgctgttggcattcaaaccggacttgggtaagaactcacacgtccaggtcttgatgtctggacctaaagtgaagcaactgagcaacttgaattcgtcttcagttgcagcaatgccagattcatccattgaacgcgtaattcgcttcttggatgaatggtgcaactgtgatacagaccatattctcactacagtgtccatactacaacttacaatgtactgttcgtctgggtcccagcaacagtagataacagctcttgttttccctccagatggtttggtggaaaatggaacgaaaacctgaccatcgattgcaggcgaagattccaacagcttcaacatctcaaagttgttgtggacatcgtaaatgataagtcttccgtcaagagaaccagtagctaagaaccgccccagaggtgaaaaccgtgtgaaccacacctcgtgcgaatgaaacatcaagctgtggatcaacgtgctggggaagtagtttaccttgaagaaatggtccatttcccgaagaggttttcccaagagaaacggttcgctcttctgattcaaacgcttgttagactcgactttcgtacgtggtggtaagtagaacggattttgcagcttctggtacgcgagggcctgatcgatcaacgtctgtaagtaattgctggggatattatatacctcgtcaaagctacgcaagcgatcgttcaagcgaaatatctttcccaagaacgtttctaccaatacactacgtaattccagcaagggattggtggctctaacactcacattgacaggataaccaaagaagtacttggagtggagaatgcggtggacaaaactaagaccaggttcgattttgtcagacaccaacagcaacaataacgttgattctgattctcgagtcaactgtgaaagaagttcagagccaaatattggggcgaatccactggaatctgaacttatatcagggaattcgtctgtcgaatagtattcttcatcgatggactctgcagtttccatcttagtatggggtttcttctcttcggtattcaatttggccgtgatttggtccaaaacaggcataagtttctccctcaagtatgccaacatcaagttctgatcaataggcgtagctggagaagtgcttggagccgagagagaagatatcaacagctcgaagaaagaggttcttctcaccaagtaaagcactataagaacaactgtcttgggatcaggtgattcgacaaggagttcttcgaaattgacttgataattggctccagtagtattagaggttttgctagcagccttgttagtgtcaatactgctaatatttgtgttggtgttactactgctgaatttgcttttaccgttgctactgctttcactagcctgaatggaattagtcgaaaacacgttggtgttcttgttgtcgaagttcagcaaaacggcaacgagatatgactcgatagtcaagtagctacctgcgcggagttctccgttgaaccactcaatcatggctatctggccattttccttggagactgagtctgacggtgcagaggagctgagccgagattcgacgatggcacggcctagctcgtctgccacgcggccatagcccaactcgtcgagcgacttctggatcaattgcaacacaaactcgtctgctgccatggtttcggtatagaggaagacgttgtgggattgttcaccgaattctggggatgccagataaggtagatcgtgatgtcgcaatgtcgcaatatcgcaaagtcgcagaaaagaacagccgaagggagacttgagccaagtgtcgcatgattcagatgttttgtattgcacgtgatagatcatgtgacaaaaatattttatagccaatgtgagagaatttagacaatactgcatgatggatgtggaatggggctgaagaagtgaagacttgctgagagagataggagagaataggagagaataggagattgatacgacaaaataggagaccagtacaaggaaataggagagagcaaagataaggatgaaggcaagtgggctggtgtcgaagaggctgaatctagaaacagaagggctgaagaaaacagtgcttcagacagaataaacattcaaataggaaagtgaaaaatgtctgaaaacactgtgacttcacataagacgaaaagatacgaagagtgtggaaaacaatgaagcaggctggggtccagacagagacgcaaattctggtggcaaatgcggtgcttaaaatagaactatttcgattcggatcgagcccgaccggtaggactgccccattggtagaccgtgaaacgggcagggcctagagacggcgagctcaggaagaaagcaacggagctggagctcaggaagaagacgcaagcacaatttcaattgctactggaattgagaattcgtaaaggttgcaaccgtggaaaaagactgcggcagaatatgtcgacacgaaaatggtcaagtcgccgataggaataatcaggagtcgctaggcagccgtctgtatgcgagtcacgtgctgcgttcaccgagattcaccatgagcttgtagtacaaaggagaagtccggaaggcgaaagagatgaccagctcaaacgacaaattcaggaacaggctcagaactacgccccctgtggaaagggacaaaaaaaataagaattgagtcctcctagttaacaatagcagaggtctgtctattagtcacgaaaggtgccggagtttcctagtctcgccgtacggtgtgtaggattagtaatttttcctgcctcgtaattcttacggagttaatccgtactcgaacgacggcggtgtaaggccgtggctggtattgtctgtgtgaaatggcaagcggctaagcaattgcagccggagccactcgggaaagctcgaccaaaccaggagagaaatggacgagctggaaaactgtgtcaggaaggttttcgatgattcctgatccgcttatgtcagcacaaaagtcaagaaatagaagcaacagaaataaatagaaagacgccaacggcggcagaaacacagaaagcattctgaaataattactgacacattgcagacaattcagatgcattcagacacaaagaaaacacaataatgactcaattactaattaatacagacaactgcttccagaattgtcagcaattgtgtttactttgctaatggtgcctcgcgctaagttgtgaatttggttctgaccagtagcccagacagacagcaaacggagcgctgtcaaagacagcagacagcagacagcagacagtagacagtagacagcattggccgagacaattgaccagcacgtaacgtagcgcgagacaaatgactgtagacccgcgggcaaactgtagacagactcaagacaaaaactttgccaacagacaccagacagcgaactccacacaaaactctattttcaattccattgtcttctggacacgcttgcatcacatattccagatcctcccctagcaggaccatcatcccaaattgtgtctgatcctggaactgccgttcgactaccgccgcaagggcgcatgatatctctctcgatcaatcttcgtatgtattccccaaacgggaattcccgatgcagacactgcgattgtgcaccatgcaccaataataaaaaaaaaattccacttgcttctctgggctccataaataaaagcgggtttgcttttggaggcaaattcacttcaatttcaatccatctgtatttctgttttcaggtttaaccatttttcctacgtcctaagcacaacgctggtactggcgtcactcagcgagtcccgtgacgtttttccttaccctgccacctcttcccaccgcttccatccatggcccaatagccatgtctaccaagaagcgcaatagagccactaaggtgtgcgacttctgtagaaggcgcaaagttaagtgtgatttggggaacccctgctccacctgtgtcaagtacggccaccgcaattgccgatacaaggaacaagacaacgaggccgactcagacttcaaagtccaggatcagttgctccagttaaaggagaaattgagactgctcgaagagtctgtaaatcagaacccagccttcagtgagtaccacaaggaaaagagcagcatcagcagtagcagcagcagcagcagcaacattaataactataacagtaatcgtaacatttctagtaacaacagtgtcaataacagtagtagcgtgaatagcaagatcaataacaatctaaacaacaatcttagcaatcttaacattaacaacaaccctaacagcatcaatgttaatgacaacctcaatatcaacaacgaagatgtcaacttcaacagcaatatcaccaacaataacaaacgacaacatcttgcggccagcagttcgccaccatttgagaaccctggttttggaatcttggatgtacggagcgtcttagggagaaaccccgttgcatcagaggaggatgtaatcaacttctacgatggatactcgtccgtctacgacaaggaaccaattagaagacggaatttcgggcccatggcatgggtcactttagtaaaagtggataactgtagtgggaagctctgggactatatacattgtgtcaagaactcgaacaaggaaatccggggcgccaagtttaacggcgagatgttaagcaaagtagacgtttttcccacagccaacgcagtggaccaggatttccgagaaaaggtcaccgaagatgaagggttcaacgaagtgaggccatataaagatgttgcctataaactctcaccgggacacaataagtcttctattgacaataagcattctcagaatactttgaatgagaaggccaagagcttaggcttgatgttctaccaagggggattggacgaggagttggcgttgatcgaaaagatccgcttggtcttgcccaaacgtaaagtcatatggctattgtataagcgatacttcacccacttgtatctggccttgccattgcttgacgaagtcgtcttcaaggaaaagatccagaagctcgtgggccaggaaagctacgaggatgtagatgtcaaagtgcaagtggagatgcgattggatttcgcccagttgggattgttgctcatagtacttcgtttgagttacttgacgttgttcacgaatgtcgcttctatcaatgaggcgaacttgattctgaatgatccatcaccaagagcccaggaaatcaagtatttattgaacaatcccatcaacatcgacgttatagatgtggctcagagctgtcttaaccagtttaacctaatgaagaatgtcaacatgaccaccatgcaattggccatgtacatgaggatctaccacatgtatgctcctgaagaaggcgacggtatcgacggtggagatgcgcaggtgtttaatgccatgttgattcagatggcttactctctaggcttgcatcgtgaaccagacaaatttcccaaagaattgaacgacgaaaagacaaacaaccttggaagaaaaatgtggtacatgttgttggtgtttgacatgaacaactgtatggctaatggtactcccatgaatgtacacaggttgtctttcgacaccgtattccctttttatagaccaggaaacgagaacgtcatagatgtggaggtagaaaaaagcgtcttaagttcattcaaccgtttcaacaacgtgtacgctcccatgacagaaattctcgatatgattgtcaaagtcaagggaggggtcaagatgaccgatcttgctgagaaattgtcgtatatggaatctcactttgtagaggagtatggcaagataggcaatcatttcgacgctggaaacttgagtcaagttgaagtataccagacaacattaaaagtcaaaatccatctaacctccaatatgtttgttgtcacaatttttttccacatcttcaactattacgagaagaaaggattttctgagttagccttcttttacctcaagaagattttcttgatcaccatcttagacttaatgcctttctattttgaattcttagaccgctcccatattattttcaagaattccacggatttgagcattactcccgcatttgaaatggtgactcataaggctcttattgtattgatgagtatactattaagagttagatttgctatcaagacgagcgaggactcctttgatcacaatatgaaattaatcaaggttatcagctacaagatatattacgactgtttgattagaattaagggtcttctcgaaaagtgtttgggcgttttcagagagagcattgcaaagttaagtcacagatattactattcgtggagaattaccaaggcacagaacttcttaaacacacttttgacaagcgaccagttatacgagacttatgctccccgcatgagcgggcccagattggaattcactaatgccatgttggaagaattgaccactattcttgaaaaggctttatacaaagtgaaggaacacaagaaggcccaaaaaggtgggtctcaagcatctaaagcagatccaacggtcaagagggatcctgcgagctacaccgttagtggatctgttggactgagtgacgatcgctgtaattcatacgaagatcgtgacaagattacacctactttttcgagtacttctgttggatcaactacctctaatgacaactattttgacggtgactacttgcccaatgaccagatcgactccatttggttacagatgatgtcgttgaagagtcaggcggcagatcccacagccaacttcaacacccctgccccacttggagtgggcattcctggatcaagtatgtatgacgcattgggaacgcctggtgcgtcccttggtggggacatgggtccttatcttgagacagataatctcaacctctatcagcgagacgatttctttggaaacatgcctcttgaagagatcttcaaagacttcagctgattttttcgttttttttccacgacttgttttactattgcttttgaaactagaaattaccataaaaaccatcaaaaagactaaaaaaaagaatgctaattgaattcaggagatctattccagattttgtatatatcattgtttattaacttgtaaatagaacgattgtgaatgaatgaatgtctatgtaaatgaactttatctaaatgcgtggatatctttaagtactattttatttcccataaaatgatgtggccatccaccggacttctgtagagaagagaatgcttgttgtcagagtggatactgattatagtccatggctgttctctgatatagagatttaagaacttggagtgaatgtttttcaatgtcaatctttcgaggttgtgcgagtattgagagtccgacggaagctgtggtacttgataagagcttataaagtcctccacatggttatacgtattcaactgtgagcttcccagagccaacatagtaaggtactcgtagagttctgcggtatcttccgaatccaaagtctggacgctagtaccaagtggatgcaagtttacaaggtccgcattaatctgtgatatagcggccgttgcagattcagtggaaatgagctgaattggaaaattgaaagttgaaactgttaaacatgtgtacacattgaatatagtctgtatgatatattgaagctcgctgaagatggctagttggttattagctatccgaagctggatcgtgatatcataattatacgagacgaactgtttcgacccgtggcctatctttgactctctgatctttttcaatacaacattgggcacgttggccaagtttggcactttttggaaagctgattcgctcacaacgattttgaggatggaatttttcaatgtgagactactggtatttgacaactctatgctggcgttatcggatactgcccggagataaatggccgagttattctcgtcaaagtcagtataatccaattgcgatagtatctccaacaacggggtttctggggcagaagaagatttgtggaattgtacaagatcaaggttagtattcaattctggagtggccgaggagagaatgtgagccgaatttatgaaacaagttgatctgagggcatactcaattgacttgaagacttcacttccgcttcccgacgtcacatgacagtgttccgacaacatggtgttggtatagaaaagaaagagtattatattgaggattagccatcttgatatagcgatggaggagtgtgtatagaactagacttagtctcgagattttccaaaatggtcgggctccagagattagacaaccaccacaagaagatctagtcagctttcgaaaataaaaataataattgaataatgattaaacgtattagagagttgctttttatgaatataaattgtaattggtatttcttgtcaattcaaagattttcaacttgagttacccaacttttctcaacaattctgcaaaagataaccaaaatgtaaatgataattcatctaaaaagaactctaaaagcattcaaagatagcaagactttcggaccaattaaaatagaatatatcagaggagtttcggttgttacgtccatctcatttaattactagcattaagtacttgccttattccttacaattaatgaaaccacaaaaatttcacagaatccagacttgtaccagaatcagcttgtacaaattcaactagtatcaagccaagatacacggtaaacctttatggaaatatttattgcaaccagcagcccagagttgcagccatttcggccccaatctctgctttatctcacacgatgctacaagtagtcacgtgccacaattactttttcttgagctccagtattggccgatgtagcagcgaaggcgacctcctgcacagtcagagccctcgtgggcccaatttatcctctgggcttgttgacaattagagtaattgatcttgttacacttaacagaggggtggagaaagccactcctgatctggcgaggaacggtgggagatgcggtatggagacattttctttgtttttcagttgaaacccttgttatttatgtagccacgaagattcgtctcagtgagagcatcacagtgatgcgattttggagctgagaagttgtctgtcgccgaagttgccgtgccagttgtggtgtcaggagtggccaatttagcgacagatttagggaaggagcgaaaaaaatagtgagaaacgggggcattctcgcgagccagcacgacacaaatagcgagaactgcaacacgagactaattgtttcgggatatttttattgttacgaggggagacctgacatggtcggtgaatacaatttcggtataatacacaatccaaaatggaataaatagtagagaataaatggcagatcagatcaggctaccgacgaacactctttctttctgcttatcttttatcctcgacgcaaaatctgaagactgttcagagcttcagagcttcagagtttcaaaatttcggattttcagattttcagatagtccatctcttgtgagtctcattgcgacccgcagaaattctcgctacagttttcgttttctcagtagaccccatcgttagctggcaagactctgcaccgagaaatttcacctcagaccatcgatcttctcccagctagctcgaccaactctgcagctcacattaaagaggatttctgttccgaaatcctttccccagaagtcagctccaccgacgtacttgtgttttgcaaggtttcttgtgtgaagtcttccaatctttcttgattagccatttcgaccaaggtattttggattttttctcgctacgatttccaaacttttcaccaccgccaaatccaccattaccagcacaaccatgctccagttccattacatggctccatgggtgcctggtttcactcacgcagtggaagccgagttgattgcatccgagaacaagccgccgttcactccgttccagttggctaccatcgatagcaagaccggtttccctaagaacagaactctcgtgtacagaggctttctctttgacgacaagtcgaacagcacattgactttcactaccgataagcggatggataaatacgacgaattactccacaacgaccgttttgaggctgtattctattttggcagaactaaaaagcagttccggttcagtggcagagcccgcatcatcgacgatgcccatagacccagtatcgacttggcttctattcagcccagtacacttatcgaaaataatcacaagaaatcgcttaaaagggcaaaagaatatgacaactccgactcggagtacttagagtctgaaaacgacgaggaacatcatcaccatcatcaccatcaccaacatcaccaacatcaccaacataaccaaaccaacaataataatactatcaaacaacatatctataatccccagagcgtgcccatatcatgtagtttgttgtcgccttcgttgttgtcgcagttcaacaacgactccaccagcgatttggcgtatctgacgttgaacgaattatcacatttgctgtatatccctcctaccgatcaggaatggagtgacgaaatcgagcgtcagtggaatggcttatccaagggattgaagaagtcgttcagaaagcctctgccattgactccgttgactgacgaacacgtcaagcttatggactctatcaacagaggtgtagatggcaagaaagacgaccatggtaaaaagaacttcgccgtagtagccatgttcatcgaccgtgttgacttggtcgagctagataaggacagacggtacatctacgtcaaggacccgcaccaattgtggagcgaggaagaagtttgtccttagagtagttggactgacgattcatgataatgattatagactacgtcatgtatatacaattgaccacgcacagagtctagtgtaaagagcaagaagtagagagtagagacgaagatagaagataaatgttaatagatagtacaaaatatagacaatggccatgaatagtcactgaattttggatatcagcgacaaatcctatgaattatggtgtataattttggatggagtcatagcaaactatacatatagagttaaggtgtgccaggggacggccaatgacccatcttaatataatgctgcacctaaaagaatctgtttcaaaacgatcttcgttttggaagtaaagttggttcaaaatctgatcaggttcaacatctaattgtggctgataggctttgaaagggcggcccccttgtcgctggctattcatgaataaagctcatgcctcgaacagaagtatagttgctggtaatgcaaaactcaaatactccatttggatctgggccacattctacaggtctagcatttcgttaaaaccactgaatttgcaattgatatcgcacgaaagttcatcaaagtaaggtattaaattttcatttttctgttagccagcatgtgaactagtagaacatgaaaactggttggtcgagaaggtgccgttggtatcattgcttacggagtagaagttttcaagcagtcggaagagactactcaggagttgaagtcgaaagtatgctagtattggcaagcactttcagcctcctgcacagtcaatcacaccaagtgcagtacgactattctgtcagaatttattaactcgaagggcacaacagaggtaaatatttgtatgagactttcacgtctccgcaagaaaaagggtattcactaatccagaactccgtgagatttcttaatattaggtgttggcaacgcgtgggatatcagttttggtaatgatattcgcgaagcagtcctagtcccaagcggaaagtatcagaagtctgtaactaatgagaacaacgaaagatgcccctcagttcgcgtcttctgtaacgttctgggtcttgagaatagcacagatgacaaaattgcattctatacgatcaatcatataataaggtacttaggtattaattctagaaagtaaatgctgatagcacttcaactaatcaaaggattgtcacgaaacaaaggaaaaacagaaaaattataaacttatgtgcaaatagagaaaaggggcagtcacaagaatggataaagaactaggcgtccgaatgaaaaacaataagtataagacatcacgatgaattcttacgccgtccaattacacgtcatgtgcattatggccgcgatgggtatcaattagaattcatgatatgagctactttgtgttgttactctttcaaagaatggatcaagcgtagagggagaaaataagacacaagattgaagcaaagtaaaccagacttgctccaatgagggttgcaccagatccctcgtactcatctactgaagatgacaaatctgtttcatcctttaaatcttcagccagagaatcagaattagaagaaccagtggagtcgtaggtggaactactagatggagcgggaaccacgccatttgtttgaaaacctgaagtgtcggctgttgtataagtcgaaacttcgccatttggacctgttgttgtaaccgtagtagtgaaccactcttcagggattgagcgagattgcacatgatcactgatgtgcttactaaactcagcagcgggcccggtttcagattcaagatctacgccaggattaatcaccacggcagatgattgacccaatgttatatcagctggtagctcgacagaggaaccgccaacagaagaatactctgttggaactgcgacaatgacagtcacggatcctccttgagtgtaagtaaacgtttttgtagtggtgaaagtaccagtccacaaagaagttatagtggtagttgggttaggtgagacttcagtagggtaatcttcaacgggagaatactctgttggaactacaacgacgattgtgtcagtgccaccctgagtatcagtatatgtttctgtggtggtgaaagtaccagtccatgtcgaagtaatagtggtagttgggttaggtgagacttcagcagaggagtattctgttggaactacaacgacgattgtgtcagtaccaccctgagtatcagtatatgtttctgtggtggtgaaagtaccagtccacgaggaagtaatagtggtagttgggttaggtgagacttcagcggaggagtattctgttggaactacaacgacgattgtgtcagtgccaccctgagtatcagtatatgtttctgtggtggtgaaagtaccagtccatgtcgaagtaatagtggtagttgggttaggtgagacttcagcagaggagtattctgttggaactacaacgacgattgtgtcagtgccaccctgagtatcagtatatgtttctgtggtggtgaaagtaccagtccatgtcgaagtaatagtggtagttgggttaggtgagacttcagcagaggagtattctgttggaactacaacgacgattgtgtcagtaccaccctgagtatcagtatatgtttctgtggtggtgaaagtaccagtccacgaggaagtaatagtggtagttgggttaggtgagacttcagcagaggagtattctgttggaactacaacgacgattgtgtcagtgccaccctgagtatcagtatatgtttctgtggtggtgaaagtaccagtccacgtagaagtaatagtggtagttgggttaggtgagacttcagcggaggagtattctgttggaactacaacgacgattgtgtcagtgccaccctgagtatcagtatatgtttctgtggtggtgaaagtaccagtccacgaggaagtaatagtggtagttgggttaggtgagacttcagcagaggagtattctgttggaactacaacgacgattgtgtcagtgccaccctgagtatcagtatatgtttctgtggtggtgaaagtaccagtccatgtcgaagtaatagtggtagttgggttaggtgagacttcagcagaggagtattctgttggaactacaacgacgattgtgtcagtaccaccctgagtatcagtatatgtttctgtggtggtgaaagtaccagtccacgaggaagtaacagtggtagttgggttaggtgagacttcagcagaggagtattctgttggaactacaacgacgattgtgtcagtgccaccctgagtatcagtatatgtttctgtggtggtgaaagtaccagtccacgtagaagtaatagtggtagtttcgtttggcaagacttcagtagaggattcttcggtagtggattcttcggtagaggaatactctgttggaaccacaatgacgattgtgtcagtaccaccctgagtatcagtatatgtttccgtggtggtgaaagtaccagtccacgtagaagtaatagtggtagtttcgtttggtaagacttcagtcgatgattcttcggtagtgggttcttcggtagaggaatactctgttggaaccacaatgacgattgtgtcagtgccaccctgagtatcagtatatgtttccgtggtggtgaaagtaccagtccacgtagaagtaatagtggtagtttcgtttggcaagacttcagtcgatgattcttcagtagtgggttcttcagtagtggattcttcggtagtgggttcttcagtagtggattcttcggtagaggaatactctgttggaaccacaatgacgattgtgtcagtgccaccctgagtatcagtatatgtttctgtggtggtgaaagtaccagtccacgtcgaagtaatagtggtagtttcgtttggcaagacttcagtcgatgattcttcagtagtgggttcttcggtagtcgattcttcagtagatgattcttcggtagtgggttcttcagtagtggattcttcggtagaggaatactctgttggaaccacaatgacgattgtgtcagtgccaccctgagtatcagtatatgtttctgtggtggtgaaagtaccagtccacgtcgaagtaatagtggtagtttcgtttggcaagacttcagtcgatgattcttcggtagtgggttcttcggtagtcgattcttcagtagatgattcttcggtagtgggttcttcagtagtggattcttcggtagaggaatactctgttggaaccacaatgacgattgtgtcagtgccaccctgagtatcagtatatgtttccgtggtggtgaaagtaccagtccacgtagaagtaatagtggtagtttcgtttggcaagacttcagtcgatgattcttcggtagtgggttcttcagtagtggattcttcggtagaggaatactctgttggaaccacaatgacgattgtgtcagtaccaccctgagtatcagtatatgtttccgtggtggtgaaagtaccagtccacgtagaagtaatagtggtagtttcgtttggcaagacttcagtcgatgattcttcagtagtgggttcttcggtagtcgattcttcagtagatgattcttcggtagtgggttcttcagtagtggattcttcggtagaggaatactctgttggaaccacaatgacgattgtgtcagtgccaccctgagtatcagtatatgtttccgtggtggtgaaagtaccagtccacgtagaagtaacagtggtggttgggttaggagtttcagttgatatcggagcacgaggaggggaaggacactcattacattgagagggtctgcttgcgtctggtggtggaccagagtataagataccggcccttgatattgtaccaacaccgctaccgtatgctgcggaaccaatgcttattaatgagggatcataacctggaccaataacaagtttataggtataacttccacttctaatgctcaagttgtttccatcgtaatcaaagctgttgatagcagtgctaagtccaataacattgttattaccccatccggctatgtggatagggatattgggaggatacgtatcaattcttaagcttgaagtactagtactcaagtaaataagttgtccttcttccataggtcttgaattaacattagtggcccagaagtttgagtcaaggccgacatcgaaacatccattaccttccactgtggaaccttggaaaaaaatgttttgatagatacaaacagttccgtcattagtaatggttttaccatccaaaccaaggtgagaagttccaccagatcttctaacggtttgatataaaatgatggtaccagtattaataaaagaaccctttggttggattgcaaatgttgacccaccggtattaccaattccagcaaaccacaccataccgttgttctcgaaggaaccaccataccaatcataagttggtgccgaggtagcattggtatcatctaaaactatccacccgttgttgacaatattcgcggtagtaccaattacatcgcaagtcatacctgtcctaacaatcttgttggtaatatagagtttgccgttaattgtaatatcattataaaagttgtgggtcataccataatcaattgaatagaaaaccccactgtttacaatgaagttttgtctgattaacgtatcaccagtgctaacaattgtattttggcttataactagatcgtcagcggccaaagccgatgcgacaaaaagtaaagatcttatcactagtttgagtgagatcttcattcttgcaatatctttttggagtaatattcattcaacatctttttggtttactgcaatgcaatatattgatgtatttatagctctcagagtcaatgaatgaatgaaggaaggaagtttggcatcggggaacaagtatgacaagagtggcctaactttcgagatattaataaaaagttagacgatatgtttctcaactacttgtcaaactcatcgtcattaagatcgtctgcaaacattctacgtattgctgtttgtctaaaacttatcgtcattaagatcgtctgtaaacattaatattttgcaccaacttttaacgaaaaaattatcctgcaaaataagcttcaataatatgcaactaaaacataggcattgtacaaatcaattttttattgataatgatataaaaaatatatttagcagctgatttcttatcccgaggagtttcgatccgaaggtatctattgtgcggtacttccaaagaagagactaggatggaaacagaaggtcgcacactttagggtagcattgacattttcagtgaacaatcttgtcgcaactgcaatcaatattgtccccaaattcgaaaaaacttgcacgggaagatataacaaatctggttgcaactaccttttaatttgtcaaagagaaaatgtttaattagtagagacacaggcttttgaaagtagggatattattttggagaagtggtgactgttaacttccggagaaacggccctactcccggatctgcaatcttgtcggatattgtacttctaaattaaaaagaatattttgccaaagtcaaacctgtgtggtacatagttgtatccttcactcaatttcgcttgtaactacctagcgtcacgaaatatgattgtagggctagtttatgagtcgttttactttccgagaaccgaaaatctcgatcccattcagcgacttttgcgaagaagtttacgaaatggtgatcgacaatagaagaatagtgtaagtcatttgcttctttttgggacacctttaagatcacttggctgcgtctgaaaagctttcttaaatataaagagaagattaatttggtttgtctcgaggcaatagtttcacagtctacatttgagaagaaaggaagttaatactcaaatgaaaaaattctagaaaaatcctggtttacttgatgaacaattatcaacttgattctcaaggtctttattaaaaaatccaaatattatttcgaattaaaatattgaatgtgtagaagagtgtaatattaaaataatagattctggaatagattcattttttaaagatagtactaacatctttgctaaacgagtattttttttgttactttttttttggattctcaagcaatatccctgacgttgacgaccagctgtattagcttttcttggcctaacccttgcccgcctatggactcacaggagacattcatttgctaaataacagactcaagaaagttcagtcttcctactctacgagaacccttgactcaaaaatctatcgaatcacaaagatattacgctaaactgttgcaactaaacatctgaagtcgtagattgtttggactggcatgaatgaagctgatgcacataacttctgttccctcatacaggtatcaacgctcctctagtccagaggctcggccaagatttacttctatgcaaaggtagcgcctaatcttaggtttctgtgaattctgctttcaatcttcagaatgttatacttcttttaaaatgaggcagaaaaagacattagacaaataataacctaagaagtacaaacagcagacttgtattcatgcacttcttccatcagaatgtgtagagtcacaatgaagaagaaatcttacgattgtcatatttttgaaggttattgtagtttttctgtctcaagattcacttctcactacaatagtatagctattgaataaaaaatcacactatttgacgacgctcttttgacaagacattttctcttttccacatttgggcaataaggggtcctttggaaggtaaatacataaattcctgccatcaggggctgatgtcagacaagagaatgctcatgtacaacaaagatcttatattaattttgatttgtatccattacttagagtgtatatttttagagtggggtttctattaagtctacgagaatctgatttccagtccctttgggctcagctcttgaaacataaacaactattttttatattcacacctctccaacctcatcaatgtgccaccaaattctgtggaatgttcgtatagctaatctaaggcattgcttaaactggctcttcgtcaatttgacttctctatgccatagcttattaaaacaacatattttgattactgtcaaatacacacctaaaattgattcatgttcttggaaaaatgttaatgaacatacccaaattgactttgatactttatacttctaagcgtttaagctgataatgaaattaggtgttcttcttctgagtaaatggagatcaccacatgggatgctgcaacttgctgattcgagaaaattattaaggcgtgcatcattttgcgtaatctcattgttcttaatggtatggggcaattggaaatagatgatcagaggaaaagcaaatgtaacttacagtctcttcaatacttcattacaaagggaccagttggatatatcaagcgatgaagttggtatggtcgattttgatttcaaacaattatctccattcattcttattgtaaaagcataccttgacacctataaagaaggcgccgctcaagattgccttacgtttttcactgaagttctttgcatgggaggaactcgtaatctggccaggttatagactctatgtttccaatctttgctgaagcagtccatgcaaggcaattttgtaagaacaaaatatctcaacatattgcaaaaatatttgaactaaaccatgtccaaacttggccaggtcagagatcccatggcgcgacacttggcgaaccactgcatttgttgtactaatgctttagcaaacgcttatacacctagaggtctccaaccgagagtttgtttcggtcacaaaatcttgaagaaaatggggcgttacaatggggtggtatagctgcacctgcacttcgctcaccataaggtcggaattccaatctttccggtccctgcgcaaacagttttgatgcatgcggtgacgaacggcttgtacttaatttctatttagcctattgtcctgtgtctctgcattttgtatatgcatgtctttagctgacaaactaatatgccttgttgaataaattggccagtttcaactggtatgatttcttagcagccaagcccgaaaattcagtagatgcttcattttcaatcttgaatttggggccttctaatcggaagcttttggagggtcaaactcccgtttgtatttcccccacagataaatgttgcaaccactgattgaattgttgtccctcttactttggatcgggcccactggtctgtatattgatgtgaatcacaaccaaatggatgagggtagccggtctgttgtagatggcggacggttgggaatctgatcattggactcatgagcttgacaagaacagagggctactactgaagatgaacctatacccggttctttatcagaacaacataggaataccagaaggacagcaacgcattaactattcaaatcgatgagaataaacacgagaaggatccaaaagaagaacacccaaaggaaaagggcgagttctttgactcttgcctttacttgaaaattggctcattgcaatagttcccaaagttaaccagctagatgtggagatgccgaatgttaaggagatcgcagtagaatgctacgaagtgtgtcttcatcgtgaggcagtagtttatcaatggaagtaatgatcttgcctccaaaggagagacaacagttgctattgttccgattgctggtctgatactggctcagttgtaggagctgtacgttcttatgaggcagtatttttgagattgcctgcaactttgaaaaaatatcattacagttcatacagaaagttgcattactactcaccaatagttatgctaggagcaattggcattagcgagcatcaggatctcaatcgtatcgggtcacagttaaccgacttacaaatatatatacgatcttcacatatccatacgacctgtgctcatctgaaccagcttctagttggtcagatccaacacctcagtctgcaagcaagtgaatggctctaacccaaaataatttaggagaaaatacgtcaagcttgtggactcaacacaggatggaaagaggaacgcccacggcaacaggaactctgccgcagagtgggataggtgatccatctattccaaggcctcacttgttttagacctagaggaggtttgtccttaggtagttggactggacgattcatgctacacatatagaaatgcacgcggaggcgtggagagtagggaaagagagtgagagagaagggtgagttggagaaagaagttagaagatagaggagagtaagaaccatagacagtactatcaattatagaaaacagtcagtgaatttaaaaattgtagtagggaataacatcaacatgccctcaaacaagagacaaatacaaagtgatactaaagaggttcattgcaagcaattcacatggagccaaatggagtcatatactcccattgaagcacataaacccaattggagcctttagaatcaatgatgttctatatgaatatgaatctacgaatttgcaatcatattgtgacaagcgaaatctcctctctcacaataataacaataacagctgtgttccattcccacaggatggacacgagcaaaacgttccaaaacacaaacacaacacgacacagaaaatcgattgcaaaaatgccatacaaaggtcaacagacccagaatgtgatcagatcacctctaacaacaacttcaatacagctcattacaatttcttcacgaagtagtcctgctactacaaccggccaccactcactaatagctcttctacctgacagcttgctaacggtcattgatcgatcacatccatatcagcccactgtcaggtgattgagcacgttatctatatacaatctacacataccgataaaacttttactcttcaaaacaagatcctattggtcagatctcaccagttcagtctgccaccaatgaatgaatgacaatagtcgcagaggaatttaggaggaattgcccaagttccagaattcagccgctttttcaccagcatgacactacaaacacacggttaagtactgcggcatggattcaaagtgcgacaccgagcccacatgcaggcgtcctcgcaatcccgcattctcatggaaaaacaaacataaacaccaccaattctcaccaaaggaaaatttataaacaaagctttttcttctttctggtttttattgttttacacaacttctagttaccaattcctactcctactactctgtaaactatacgccatggctccaaagtccaagaccgccgccgccgctgccgccgccccatccaaaatcacctacaagggtaagtagttcaactgctccgatattccccatctgtttgtcccctctctggctagttgccgagctggattttcacacaaccaaaattaggattcctacattaatgtaatggatcgtataagagatcgacatactaactatgctttagacatgatcaagtctgctatcgtcaccttgaaggaaagaaacggatcttcgtatgtgtctcctattatttccagatttagggagtgaggtcattcgccaaaagatatgcctgcctggactgtgacattttgttcagtagaaacagcaaatcaaccatttgattggcctaatactgtaccaaacatatgcaacagacaatcgcagcaattgtccgcaattgccgttgtcaggctgttgctaactgttttcaaggggcagttcgcatcgcaccacactcagaatagcatctcactttgtgcaatactaaccatttctagccgtcaagccttgaagaagtacgtccaatctaacaacgacaccaagactgccaacttcgatgccttgttcaacgctgctttgagaaagggtgtcgagtcaggtgacttcttgcaaccaaagggtccatctggtccagtcaagcttgccaagaaggaaaagcctgtcgttccaaaggttaccaagaaggctccagtcaagaaggaaaagcctgctgctccaaagaaggctgctcctaagaaggctgctccaaagaaggttgtcaagaagacagctgccaagaaggctgccccaaagaaggctgctcctaagaaggctgctccaaagaaggccgctaccaagaaggcagctccaaagaagggttccaagtaaataagttgttgacaagacttgatttcctgtttgtatattagtgctgggcataaaaaaagcagttcaaaacttatacttttccttctttatcgtacaccatttgatggtgttttcttctttaccaccaagctagagttgcttgcttgtttctacgtgtgtgctgttgtctattattgttttattaatacctactactgtcgacaaagactaattgttctatttttgtgcctgtctccttctctgtatctctttccacagttgtttatactattatgtattattgttattatatagctgttggtggatttttcagtaagtgtgtatttttagtaaatgaatagttagtttttgcaacatgtagattcccaaacaagtaagtcatctcaattaactctttgtcgtatttttcagtctttggctgattcaaaatgcttcgcatatgcattcattaactagctggattttgcaatgtttacatttgaatacaatatatgcaggaatacataaactcatgcaaccttagcatttttcgtgttcgcgtcttgatattgatgcgacatttagcgacatctgtgaaaatctcatatatctattattgtatggtaaacctttaagagaaagtagtcaagtttctgctatatacatctagtgatattcttacaagagataattatcatagaaaatcctgtaaaagtagtatcagattttcactcatacaaataattttcgtttgcatgtctgagatcaaacctactatagccatcatagtggctgccctaaagccagatcttgccatagggttccaaggtaaaatgccctggaggttacggaaagagatccgctacttcaaggacgtcaccaccaagacctcagatccatctaagatcaatgctgtggtgatgggacgaaagacgtgggattcgattccagctagattcagacctttaccagatagaatcaatattgtcctctcgcgatcgttccagaacgagactgttgacaccaacgtgatacacgccaactccatagcaaactcacttagtcagttgcagccaaatgtcgagagagtcttcgttatcggtggagcggaaatctacaatgaattgattaacgattcgagagtgacccatttactactcacagaaatcgaaaataccaatgaggacaaccaaatcgccgtagataccttcttgaagtttccgttgtatagtacagattcacaatggagaaagcaaccgaagctggaattacaaaagtttataggctcgtccatcaccttagaagatgacatttccgaaggcgaccttaaatataattacacattatggacaagaagggctggataatggtaatggctatctttcataatgtcttgtcgtcgtatttaagaatgtctatacacttcatccaagtatcgaattacagaataattatgttactatgtacattactattagaaaaggtttataaacatcgttacttgctatttatcatcattagttttggtcatcgtaggacttcctgttcttcaacaactcgggatcgtacactctcattctgtcagtgattctttcgtcaacctctaattcttgcacccattcagagtttttttcgattcctttggcaacccacttctttggccattccgcttcttcttctttagccaggagagtgtctttgaactcatatggacgagacaagttatacacaatcgatgtagttctgcgtccgaaatcatcagctaatcttctggtggtaaaatatttgtagatcttctgggggatcttcaggaaacctgtcaacttaggaatagggtagacataaaccggctgctcaaacaccacaggaacatttttgtcattcaaaataatgttcgccatattcaattccggagccaattgagctgctgcgtactctgaaggttggatgaaagatttagtcacaggaggaagtttcttggttccagcttcatcatcgtcgtcatcaagatcttctgccggtttaccttctttgattctttcttccttttctttttctttggctattctggcttgttcttcttcctctatcaatacctgcggcttcaccaaaggtcctaacaatccttcgtgaactcctgcaaggtattccttgtatgctcctcttccaatgcaaattacaccgccagcctcttcggggttgatttcgtcctcggacttgacctcttccataggcttaaacacgcggtacaaccccataacgtccctgggcttgtacaactccgatctcttgacaagctgttcatcttcaatttcgccgctctgggacttctggaacaatttggccccaccagcaaatgacgtccaggttttggaattcgtttcttctgtgacagaatttgctcctgcaccatttacaccatctacacccgaatctaaacgatctaacctcatctgtctgatcttctgtgcaactgactgacgaatatcaccttgtcgagactcgctgaagatctcataatcaagagaagcggagtttaatacaggtttgatgaatttcctgaacaagcgcaacgattcatccaagaaatcgtccggaggaggtgcaatataaatcgtcaatttacgaggagttctgtcttgaggatatacttgtttactcaaatgctctacttcagccatccacttttttctcacttgcttctgttcatacttgtcgtatgctatacctccaccaatggaggccaaaacagtccagaaaatcatccagtttctggagggaagcgaaaatctgggaatgcccatcattctcaaggctggattcttccattgcttcttctccaccttttccttagcagtggcaacagccttcttgcccaaatcttcagctttggaagctgcagactcaggcttctgaccagttttattttcgcctgacatttccgttagtgaacctcgaatcctaaactcgttgtacttccatttcatatgtagagttttgaataattttacatgaggaagatttctcaacattggtcgtgtgtcgacaattttcttggtcacgtgtcgattttttgcacccattccccattcatttgcatcagaagttgtacagaccatttccagcttcaactattgaattgaggatatgattgatatcttattaatttttgttgaaccttactaagaatgttttttttttgtttttatttaccacttctttacacacgttttacctacctcaagaaactcttcaactctaccaacaagtcatccttgtcaagatttttgcctataaaaaccaacttgttattctcaactccctctatcaacactccaccgcttatgatatcgtacgtgtcccttacaccctgaacaaccctcacgtctggtaattcatctccattcttcttcaccaataatcccttcattctgtggatttctatctctttggagttgataagcttctcccaaagaacatgctggaagaaggactcgatctggtcaaactggttgtcagatacgaaaaattcaaaatccaacgtcacagtagtaattctgctatcgtgaaatgtggccatgtcctttacatttatggacttttgcaatttctctacgttcggctcaaaagcatggagatcaaggatcttgtctagatcgatatcgccaaaactagtagtgtgtataggtgagctgagattgatgtctctgatacgcttggtgatctgttcgaggtcgacatcactatgttctagtctatcaatcttgttcaccaaaatcgtgtcagccaatgcaatttgcaaatgagctgtggttatgccttcgttaagcttactagcctctgctgcgatttcctcttcggttaagtcctccttattggatgtctgggcctcaagtaaatgcttgtgctcccggtgccaatgaccacctacatcatctaagcaacgaacaatatgttccgagtctaccactgtgattactccgtctatatagatattggaggaaagcccctggtctatccagaacatcttcgcaataggtgcaggatcagcgatgcctgtagtttccaacaatatgtaatcgatcttgtctctggagttttctatcaactgttcaatggctacaacgccgttatccttaacggtgcagcacaagcagccgttgcccaaatccaaccattcctggatcgactcgttcttttctgcgtctttaatggtgatggatttttcaatcaccgaggaatcaccaaactcattcaatatgatagctaacctcttttttgatctttttcctatcagttccaagagtgtcgacttgcctgaacccaaatagcctgtaataattgtgatgggaatctttctttttgtctcagcatcgttctccgagtctgctgctgtagtactagatgatatggattgtggagtagaaattgtcttgagagtagcagcattttcagatatgctgttctgaacgtttggatgaaattgttgttgcttcggttgcacttctgaaatttcatccaaatcaaccactaattcaggtatttcgtccatgtctaggctttgaattttgcaatcgtaagaataaataaattgagtcaattttttttgccatagtaatatcgcacttgccttctgtccctacggcggtgcggctccaaaaatgtcgcacgataacagattgtgctgccggtacattagtgtggaagctgatagaagcgcgacatctggcaactatctgcccgcaagagcaattaggtggggaaattttcagtcgatttcagttctaaattttcactattttcatattcaattcctcttcgacaacttcttctttggaaatcttctccataccgctagaatgtacaaattctactggctccttgatgcagccgtcgttgctgcaatcgggttctacttggttcttgccccatacactaaggtggaagaatcgttcaacttacaggctgtccacgacattcttaactatgggcccctcccatcccaaactatcacagacaactacgaccatatcaagttccccggtgttgttccaagaacgtttgtaggcagcttgattctcgctgcaattgtcaactccgtcaactcgttctccagaagtattttagccgtagacttattggcaccagagaaatcacaatctaacttgcaattgctagtgagggccatactaggtttggctaatgccttcggtttctacaaaattagagagagcatcaacagagtcactattacagacaagaagagtaaaacaaaaggtgttattggattctggttcacagttttgcttttgacccagttccatattctcttctactccactcgtacattgcctaacttcatagccttgccctttgtatccatcggattgagtagacttatcgaaggtgatattgttggatatgcatggttagctttcacgggaattgttttccgtttggaggtgggtctttttgctgtaatcattgccatcgtttcctctttgggttttggccagtcctctatctttgttaatggtttgctgttgtttaccggtaccagcttaggaggcttgatttctctcggagtagattcgcatttctggggtcgtcttgtagtgcctgagatcgagtcttttgtatttaatgtcgtagaaggaaaggcttctgagtggggtgttgagccttggtcagcctacttcggtaaatacctctttcagttgttcagacctcctgtgatacttttgttggtattgccaggattgtccagcgacccagcagatgacggtgtcacttttgtagaccaagctcagaagaaaaaggttgcccacccagcgagacactcattgagaattctctttgtgtcttctgtcttgtacatcgctgctatgtcatttcaacctcataaagagtggcgtttcatcatctatactatcccaatattgactttgcaagctgccaatggtctcaccggtatctccagaaagtggagtttgggtcttacctccaagctcttgcttttgatcatcatagccttgtctttccttgcatccttgttatctctcttatctggctatgtgtcacacttcaactacccaggcggtgaagctttggcctttgtcaacgaatacgtccagcccttgtcttcagaagaggtctttgtacatttggatgtgccagcctgtatgaccggggtgagcaggtttggtcaaatacattcagacttaatcacttatgacaagaccgaggatgcaacagagttgtctgagatctggtcccaaattgacattcttgtcacgggagtcagtccggctgaaatcgacaagaatttttgggaactcttgcattccacgaaagcattctatagcatgtcagtgcagccaatcattcaattgcttcagagacagcaaactgacaagactgccgtcaggagctttgcagtcacggttgggaaggaagccatccgtggggacttctccaccatccacacgttcgtgagatcattgttgttgaccactgactacatttttgtctacaaaagagttcaaccagatccaaaatccagcaacattgaagaagtacccagcgcaattgaagatattgccaatggtacgggtaccattgcaggagtttctagtgaagcaaatgaagaacttgctagtgagctgatagaagttagcgaagtcgaagaactagaagttgttgaggaaatattggaaccttctttagaaatcgtagacccagaaaacaccattgaaactgagcaagactcaacgattgaagaagtatcaggtgcatagaacggtaagcaagataatttatttgtacatatgctatctttaatgttacacattattaatatacactaatttacattctagatattgccgagatgttggctcaatcgtgccttcaaacgcgactcaggagagaagatgggcaagtcattgtcagtgggaaacatgatcggagtgattctacgaagttgctttgctgtttccactgttaccttttgtgtttcttctgatgaagattgatcactatagacctcaacctcagttccagacgagaatattggcggatcaggcggtaaaattctggagtaccgggatcgcgacattatcttcgaactatcgagtatcgaatcttccgccgaaataaagcttctagaagttacatagctccggtttctattgggcgaagtctttggactggagcctttggctcgaccaaaatgttttctataagcatcaatcttttcattcttcaacctctgagtcgtttcttgcaactttgtcggacttattctggatggagtaaggacagttgatttagaaaattgcatctttaacggcgtgttgaagtaagattctgctgcatcctttttcacgggactgctccgtgggaaacttcttttagccaaaggtgacagtgtactgatgaaacttgagttcgacaagtcaaaacttgaaacttcttgtgatgatatatccattttcatttctctcatcttgtaaatccataaatccaatattgtttttaaatgaacattctcccatctctgtataaacaaatcgcaactttgctcatttcttttgatggtcttgatgtatttcatagaccaattgctcaagatgcttcggattttctcaaattcacgattgtcataaaattcattggcaacctcgtcaaggtaaactgttttgttcaagtattcattgtaccagataatcatacttttcttcaataacaactttctattaagatcgtcagcatcctgaaataagttttgtttactgatcaaatttgacgaccaactgtcgaatgctctctgaactaagggcccaatcaggtaggattcgtcaagtctgctttccaagatcttattcacttctagttgcttattgtatttactcacccagcaaacaatcatacgccgcttcaagtgaggtatgatcgtggtatcttgaaacatctgaatctttctctgagacttttcatcaaaattccttcgccaagactctttccaaaatgtgaaaccagctctcaacaagaaacaattctgaaaagacaatttgttattaaataattcagcttctagtaattggcagctcgatctgtttcttctgccagtgtaaactttccaaaatttcaacttgacgaattcatctgctttctcgttaagttttgaattcactccgattctctgtctccaacgactgaggactgtctgcaataatctttgctcagtcaatttagaagagtttgtttgagaaatcttgttggtgatccatttttggtgccagctcacaaacattctccttttcaaaagatcctgtgatttagactgaaacaaggacaagttgtaaacacgattccaatgaacaaaataacttttcaaaatagaagtgttccttttaccagcatagattcttaatgaatgatggtcaagacgttcattcttccatttactaaaatatcgttttaaaagcttctctctcttgaaagaaaacatcgatccagcgttgcgaacttgttcaatccaaaaatgaaagtacaaaagtttcaaggttctatatttttcattaagtacttctttaccagttaaagaaagtctggtttctttcaaccaagtatcacgtataatgaacttcaataatatcatatcatttgcaactttgacagaattaaatctcctttgtagatcatgctttcttttccatgtcttccagtgcaacttcaaaataaacatttgttcaatggcacctaacttctttagcttcgtaccaagacccaaaagattatctggtgacgactctgacatattaatttcattgactcgagaatgccattgttgaaaaaaatgtctaagtatcatcgatgagttgattctgacaaactcatcatttttggctatagatatttttatcaactcttcggctcgttggtgtctcttctgaaattttcgaaaataagtttggtatgtttctctcttctccgtcgctagttttgtcaaaagagcttcatgcacacgtatcaaacgtccttgaaaaattttgaagaactttctttggaaatatatatccgctgcatagtcgttttgaatggatgtattcatggtcattttccaattgtagaaatgtttgtctactatactttgcaagtagtaagtctcggcttcttgatccaaccgatagtacttcaaaccctttccgtaccaacttctcaagtacctttccagaagacggtcttcaaactttgactggtgtttatgcatgagactatcaagctggctcaaagaatagtaacggtctctccaacattctaatactattttcttcgattgcatgcgtttcagaaattccaacacactgatacgcattagcaacgttgccggttggttcatgatattcttgggagacaaatagtggtgcaaagtattgagcttcaagacgttatctttaatcgaaacggcgttactgtcatcgtcttcattctcaaaatctactattctgttgacaacagctacaacttgctccatatattcaaagtcgtatggaacaaccaaagtgggcaattcgtcataagccactatcatgtagtacttcaatattgctggatagcttgaatcaaaactgagattgaactcatttagcaatgggatgatatgatcgaggtttcggtacaatttgagcctgtcttcctttgcgaaaggctgtagaaaatctacactggcaacagcttcattttctgtttgtacagctcgagtagtttcgcttgattgttgtgaatcgtttgaagattgtggatgatcagcaaaagtcttctccactgcagcaattgctctttcgtttattatttgaaattctgctggtagcaagctggagaagaactgacgaaaggcggcaaacttggactgccggtacgcagttgagttgattccaaagtaagctatgccgctgtgtttcttacagaggtttatcattactttgacgtattgtttgacatgacggcgagggttctctttagaggctaatacattcaaaaaggtgtggtatgcccactggagattactatcagtgcaagaaaagcctagcggagctatgtctgaatcgtcgtagatgaaaatcgagtcattttcgtcttgaccctgcaatttttcatcttggctgtgattaacgtactcgtctagaatattgacaagttgttctgtatcgtcgttgttgagattaacatccaacttatgctgaagatcattgaagtacttcaagtcatagaggtagcaattacataaatacgatgccaactgggcctcgcaatcggagttgaggctgatgagctgctctacaagatgcgagaactcgactataacggcagaatacgaatccttgatacgtgtaggccggcgatcttccgaaagcactaatagccgcacaagctggtctagggcattactttccagtggattgtcttggacattgtatcgtctgacataatccaagacgtttatgaatgataaactggaggtttcgttgcggagatgacgattggtataggctaacattgaaatagagcctatattagatactgacagtgatacacggatatcgaacgaggtacatattttatcgctgtcgtagtctagcaagtgaaacacgtctgttattgtttgctggagtcgtgactcgtagttgtaggcgttgggaagagccagatagctgtgcaacgcgtggagttcacgaagagtcgtgtggagaagatctttcaaggatgagatggacatcgcatcgtacagtagataattgaaatgaaagctaatgagtgtgtatgactatgaattgaatggaatatacgtgtaatggtagtttaagatgtctaagtattgtgaagaaatgaaaagtaaatgaaagacagatcaggaaaagataaatattgataatgcgaaacgaaatttgttttaggactttaatactgtatccgctcagttgcaaaatcaataagcgaactaattccagaattgtacgaaaagaattcaaattgtcacgaattatatatacatgtctccatagctcatgtcttcgaattaccatcttgatctggagtcttgtgataaactattaatactataatctgaacggctaagttcttctctcgacatcacgtgcctcttgacagctccctcggaatggctaaaaataagttcctatagacttcacagccatttgacattgaacttgaaattcatatctgcaattctttttcatttcttttcaagttcttttcttggtctcacttctcacttcccgaatctatctgccgttgaggctgccatcgccatgtccaaggatccgcgtggatctgcctatggcacctattctataaataattcaagctccaatgccataatcagcaattccacaaacaattctaacaatagttccaccaataatatgaacagtagtaccaatcttaacaatacaaatacatatacaagtcgtactggcaacgcgtatccggaaagtaatagaagatctgtcagttacgatgccaaacgaatccgtcttccttatgattctgctaatgggtctagactgagtttccaatccgatggaatcattgattctcactcaacttttaatctcaattcgaccagcagccccaggaccaaccgtatctccctggatggtgtcatctatgctccgaaatcaagttcactagatcccggaactcgttccagacctcctcaggagagagacctctcgctgttgccgtacccgcaaactgactttttctcctttgagcctccctcagtgatcacaaccagggatattagccatgatagcaacaactctaacaataccaaaagcaataccaacaattccaataattccaacaatagctataattctaataattctagcagcacttacaattccaacaatgctacgtacaattccagtagaagcagcagtggtaacacaaggatgtccacaggaaatcagattacagattcaatagtgcctcctccatcgctagctatcgataacaatatcaatccaagcttttccttttcagagcaagacgattctatgcaagactttttggtttctcccataaaaagtgacactctctcataccctacacttcgtggcgatgtaatggtaagtcctgtagtagaatctcctgagattccctcagctgcgatgtcgccttctcctcccaaatctctcacaaacagccttggttccaatgccataggtctgattattggtggatacaattatagcaaggattcactagaactttcggctaaaagggaacagtcgtttgctgatagtattcccaagattagtatcagctcgtccaacttaaaggaaaccgtagatataaactctatacccgaggaacagcccattacaacttctatgcctgtaaataaccagatggctagcagctacgacgtagaccacaacagacagggatctggatcttcaacgatttctaacaactcaaccatctcagcaacaacacctgcttctgaaaaggctaacaaagatatgcgtttcgtgagatacgccatgagtacacaatcgactctagtgaattcatacaataacaagtggctgatgccaaacgtgttgagatggttagaacagaatagcttcaatcagtcttggaaagaaacgttccgcagaaacgaaatatcaggcaatagattccttgagttagagaacttcgacaaaaattccatgatctggaaacagttctccaagtaccttgtactagacgataacaacaactcagtggacaggtttatagatcttttgcggaaggaaaactttcagtcagaacaggaagatagtatagtatcgccattgtactctacgagaaaaatctccaatgagtccaattctccggttttactcacccacgccgcaaagtcagaaaacaggaaatccacaccgattttctataagcacaaatcgacggcatctatatcttcgtcaaattcatcttcttctctcaacaacgtcagtctgagcaaacagaggccagtttcatatgtggatcctgccagttttcctaacactagttcacatctgttcttcagaaaacaccatcggtcttcgtccatcgagagtcctaccttcaaggaatcgatcagtgctcctgccagttctatcattcctaactcagctgggttgccgatcaacaataagcgaaacagcactaaaactacttccgtttccttaaacgatgagtatcttaatgggaaatccaaacaaggaaagacaaaatacacttcaacagctaccaaaggagatccttcgagaaggagtggtattttcagcactctacggaaaatcggtggtgagaaagcagcggaaatcgtaaaacaggtccactcctcttccagctcttcgaagatcagtccaatctcaacgaaaaaggcatctttcctgacaatggctacttattcttcaccagatgcattcaacacgcgatcaaaagtggatgaagtgccacatacattgtttggcagacattcgagtgagactttagatccaaatcctgattatctcgatttaaagaatggccaggaagcgagaaggctatcaagatctagttatcaaagtgttcccgaggacgaacttgtatacgctcgcaacgaagagaaatctgtaactccgatcattgaaattgttgaacctgatgcagaagagtacattgacaattatgatgaaagataccttcctcgagcaaacccttctactgcatccccggtcaacaccatattggtcagtaaggataatgtgtcttttgtgcctgtttcaatcacagaagcagatacgatagatattcatttcatcaaggagacattggtaaaaactttggggttgataaatatcggactaatcacgtttcacatgacggaatttcactcgaaagaaggtatctctcttccagatgacatccttttgagaattgtaaagaaagaaaagaacatcaagttgttggttagacaggaactaggatcaccatctggtactgctacattctcgacaaactcgtctgattcgaaatcgtttgaatggaaaggtgataacaacgacgagcaaggttatcctgcgactcctcagtatttattgggcaattccaaagattctaaggtcgattattggaacttcaaggaaagtacttcgaacgatagactctctaaaattaatgaagtgccctctggcagaactccttctgatggaaatgaccagtcaaagaaacaactcgcgaaccaacactttccattgagattgcctttcccagttcacaagaaatcttctgaaaagctaaattcaggttccaaaactccatctcttgttattaataccaagcatttgaacgaagttaaacagtcagtatctccatcttcagctcagtcaaataactcgtttagagtcataaggaaggaaggaagagaaatcgattttgacaaaaggagaaagtcgccatacgaatctaaggctcccaagcttattcccaatatttactcctcgtctgtttcagattctttgagatctcctgtctccgcaacgactgttctaacgttgaaagacgaaattccgcttgttaacagaggctccaatgcgagcacgttgtctcaagttcgcaacaataacgatgccgctcagcatgctttgaatctgcttccagaagagctgaaggaagatgtttctgatctgagcagggaagctaatgccaatcagggaggtataatagcgaagagagcagctcccccacctccactttcgaataagctgagtattcgtcgtgcgaactccgtcctcaagagatcgctcaagagcagactgacctcagtgtcactggtatctcgagaatctacttctagtcgatctctgagtgaaagagtctctctcaaacatggcaatagtcgggggtctggaggaagactgtctattggatcgaagaattcagacatgtttaaagagaatgaaatatctttcgacgaagctccctcgtttgattacagggccattgcagagccaaccctggacagcgatgatgatttctttgtgaagtctgtaagaaacgacagcagagatagcactcttgagggagacagggatgatgaagaagatgatgacgacgacgatgatgacgagtttttcatgcgaccaatcaacaggaaacaagataagctccagagagtaacgttaacagacaccacttcgattcatacgatgaacgttagacctcctgttgatgaactttacagcaacttagagaagtatttccctaataccaatctcgatcaacctattatagatgatacaccagtatctccacttccaaaagaagcgattgctacaactgcatctgccccagtaaggaagcctacgatttctagaacattttccaatgccaatatgtcaccagttaaccctacaattgattcgggcgacgaaatcttttatggtgaccaaactcacaaactcagtcgtcgtagaatgaaaacaattcgtgttgtggccaatgaagctcggaaaaagtatctcgagagacagaagaactcaccaccatccacattttctgtggtaaccagagcctccagtaatggcagtgggttggccaggtccaatacaaagatgtggggccagaaagttgtagaagtgacgtccactgagattgaaaagggttttgtaagtaaacttagaaacaacaagaacggccagtttgaagagtttgcatggatcaaaggtgaactcattggccgaggttcatttggggcagtctatcttggtttaaatgtcacaacaggtgaaatgcttgctgtgaagcaagtggttgtttcaccggaatacagagattctagcaaatctggaggaatcgaagccttgcacaaggaggtggaaactatgaaggatttagaccatgtaaacatcgtccaatatttgggctacgagcagaagggccatatctatagtttgtttttggagtatgttactggtggatcgatagcttcgtgtatgaagtcgtttggtaagtttgaagaacctctcattagatttatctccaagcaggttttgctaggattggagtacttgcactccaatggaatcttgcatcgtgatctcaaagcagataatttgcttttggagctcgatggtacttgtaagatttctgactttggcatttcgaagagatcaaccgatatttatgctaacaatgctgaaatgtcgatgcaggggacggtcttttggatggctccagaagtcattgacagcattgtggaagacaagaagcaaggatattctgctaagattgatatttggtctcttggttgtgtagtattggagatgtttgccgggaagaggccctggtccaatgaagctgttgtcagtgcaatctacaagattggtaagaccaaattggcacctcctattccggatgaaatagcccatttgatatcaccagaagccaaacactttatcaatagttgtttcataattaatcctgaagagagacctacggccaaacagcttctagcccatccattcaccagagtcgggtctaacttcaactttgagaacaccaagttggcgagggccatcaagttcaactcgcgaagaagcttcactcatgataggtagtgctacgatgtcgtgatgaaattgaaaattgtaatatgaagctacgaatgtatcattaataaaattatgtactatttacagaggatgttgtagtatgtatgggatgtagttgtatgaagtgtgtgcctagttgactttcaactcgttaatcatcaacacagtctggaatggttctacagggaaggtcttgagtcttctgcatctttgcttctttctgtatacttcgtagtaaggttctctggtgatctccactacactagctttgagttggtagaggtcttgaggtattccttcgtcgttgttgtatgtgaaatcaggtgaacctaaggttgtgacgttgtcgagaaccaacagatctcctacctgggcgttcgccaatttgaaaggcaagtaaactttgtctcccttggtcaccaaatatggcatattgtggagtttgaatacagcatagaggtgcttggagccgttcgagtttaacttcaaaggagtcaagtctggtctggtcgaggtagcaagagtacgagcagacactctggaagactggagcaaggatctcaacattgtatgtgaatataaagtgaaatgtgatgaaattatgagaatgttgaaaagatattaactattgattgaaactcacttggaacgatatatttggtatagtagactccagacgggttgtacagccttcttaggtattatagcaagaacgatgttgtgataaaaggaaacagtaaaacttgaatatatgtagaattcagtaattcaactatcagcaatagcagtattagtatatgatgatttcaattatcaaattcaatgaaatcataaagctgagcagcagtcttataagctacagaataaccactctattaatattcagacacagattccgaacacggtaagttctgctttgtagacatcccaattcttattcttgtcttatggtcaaacttttcacgactttgtgtcacatgtcgacaaatttttttctgcctccagaagcgcaaccgaacttccactggagattcccaaaaaaacttagacaccgtagaagtcactaattccagcctcgactgtttttccatatattaggctgttacgcttgtattgcattgtacatagtgggaacacttggtcaccgtcttgcgttgagttgtgaattgcagccaagagtattgtgctagaattgactctgcttgtatttgataggctcaattccctccatccataggatcatagcattttcactataaattaccaaatcttcaggaattcaaaggcagactacttctactattcttgagtgttttattttattcattttgccattgttatattgaagttcacttgtgatattctccttgttctcatattaagttagtgttcaactattacaattacctattcatagcttctgttaccacactacgacataagattcagaaagtgtactgttctagaaaatccaacataacccgctccctttcattgcaatacgcatccaacaactcgtcacaatttggctgatcgctttttcttgctatcatctttattggtaagtctggctacattccgacattccacatattagcattctcgggccatttaacgtataccctagctttcactcacaatcttctccactatgtctggatccttttggaagttctccaacggcttcacatcgctttcaaacatctcaaccatcctagaaaaccacaccatcaacaatgagctgggcgattcactgtacctgaatctgtacaatgtgctcctcaagttgattgatgaaaacgatttgttgcaagagttgcttctgaacaatcccatgctcttagagtttttacgtgaaggaaacgtccttgccatgttggtagacatggtcacgactgaaggtgctttacaggcaaagccgtctgaaaaagaagaaaaaccagcagacgaaaaaattaaggagaataaagacaccaaagaagatgatgttgatgataacgacaaatctaatgatgaagaagcagaagaggaagaggaaggagaagcagaggaagaggaagaggaagatgaggatgaagaagaagatgaggctgacgaaacagacgaagaaagagctacacgccgtgctactattgcggcagaaatcttatcggccgacgtgtggtcacttacagacaccgtgatggaatcgacgatcaatttgaacaagttgtggtctattttggactcgaaatcgctgctctccataaacttgtccacttatttcatgaagatcatggagcatttgttggacatgaagtgtgatgaaatgatcacctacctcattgagaaccaacctaatttggtgggcaagtttatgaaccatttgtccaaccctccgcttatggacttccttttgaagttgatttccaccgacaagccagataattcgactggaataatagactatctccaaaatcagagcttaatatcacacctcatctctgcattggacatttcggaagaggctaacgttgaagaagccgacaatgacagcttattagtcaagcagtcttcagcagcagacttcctaaaggctcttatcaccatatctgctaattccactacagacaattcaaccattggccccaatgagttgaccagagaattggtttcttacgagcagatgtgccacttatgtgacatcatgttaaaaggaggctacgccttggccaatggtgtcggaatcatcatagaaatcattagaaagaacaactcggattatgatatcttacctgttttgtacattaccttggattcacatcctcctactggaagagatcccatctacttgggccatttactcaaagtatttggcagcaagattggggaattcaatcacttgctcttgaaaaacgatgtagacaacaaattaagaaccccttttggagaaattgagccgttgggttttgagagattcaagatatgtgagttgatcgctgaacttttacattgttctaacatggcattactcaatgacaacaagggctttaatgtagtcaaggaaagagacaatttgagagagaagatgaaggagtacgatcctgtcagcttcaaatataacgagattatcgtacttcctgaggagaagaaagaatccagttctaatgatgatgacaaggaagataagaaaacaaatgaagacgactacgctaatgacacgatagattcgttcaactcgaaactacgcaacgaagaaggagattccgtcttgcaacatcctaatgaagatgacgaagaagaaccacacgcaaatgccaatctcaccgaggagcaaataagagccaatccagttgtgggcgactttttaaagattgcgttgtttgatacgcaaatcatttccaatattttgtccatgttcttcaagttcccttggaacaacttcttgcacaacgttgttttcgacatcgtacaacaagtattaaatggctcgatggacatcggttttaataagtttttggccatagatttgtttcatttaggagacattacgaataaaattatcgaaggtcaaaagttgtgcactggctacgaagaggaccacaatggtttgagattgggattcatgggccatttgacattgattgcagaagaagtagtcaagttcattcagctttaccctacgaacaccttaagcgagttgattgatgctaaagtagaagacgaagtatgggaagactatgttagcaacgtcttgtacgataccagagagaagtacaacgctatattgggtggtggggacgaagatgaagacgacgacgacgacgtcaacaatacctttgatgaaggcttgggtgagattatagaagaggtcaagacgggattggtttttgattcgaacgttgatcacgatattggcgacaacgagtttgagactggtggaactgccacagatactgaatctgacattaaggatctagccttgagtcaagaggctgatgtcagagatcgtttagacagcgacgaatctgagtcggacgacgacgaccacttcaccagttacatgtcacagcaattgacaagtacagcttctacagaaataatctcatcttcaatggtctcacagactaaagagatcacaagcaaagagctcttggatgcagatttcgaagacgctgatgagtatatcgacccaaacgatgacggtatgtcgtacaagaaatcgcatcccttgtacgattctacgggctcgttgttgaccgcacgtgttggagcagagatggaagatgaggaaatctccagcgaggattccagttccagctcttcggacaatgacgacgaccttggtttggacgatgaccacctttcctcagagaaagacagtagcaccaagttgaccagatccgctagcaagggacactaggggccagcgttagtatgagttttgtattacatttgacggttttaatgaaatgaattgtatctatataaaatcttacgcctattaattacgtccacagtatattcgaatatacagcattctaaatcgccaattgtatgattatgtattatagcatgaattctgactaataggtggtacgtgattattgtataaatcttatgtaaatccttagatcagaatacagctgcgtcgttagaggctcttcttccctctctggacaatggaggtacatctgccaaagtagagtcaacttcatcttccagagacttgtcatccattctgtggctattcttagttgggactccgcccataagacctttgctcatggctaaaccagcagatctttcgttaactccaccatcgtagaattcatcttctataggatgcattaagatggtattgttctttgtaatagtgatcaacgtgttggtagggacacagatccaatcacctcgttcaaatgtcaacggctcactggctacaaatattacgtcctgcgatctgtttagacgttccattttgaataatcctggttcatactcaaagaatttcagaccagtgctaaaatgaagcgaagctgcttcatctgtcttggacgtgatatatctactgaccacaactgattcaccatccgttacagcaaagttcatcaacgacggctcgtctgtagtttgggtctgccattccttgatcaactctatagttgtaaccaaagctttacgtaagacagagtgagtgaactttgtttcaaaattgccagggtcatatcccatcttgtacaacgtatccaagaagagcgcaaaacaacactcagagtccgtagaaccctggatatataagaaaaactgctcttctaaatgattaacgagtttcttcttcatatggttgaattgcagtatgccaccattgtgcatgaacatgaccttgccatacgagaaaggatggcagttggtttcagacaagactccctgagttgaagctctcacatgaccaaacaccaacagagcttcggtacagtccgaaaggttgtttaaattaacgttgttccacgcaggtgttatggcacgaaagatacatggcttgttggaagcagtatagtagcctacaccaaacccatctccgttgatggggtttctcatatcaagtctgagccgtgagtcaaacgactggttgatgatggaatgcgctggtttggtgagcaagtccgatagcaccatggactctctgcccttgtagatcatgaaacggcacattgaaatatgaaaatgcaatagtctaagtaaatgctagtataaaatgaattgaaacgagaaaattcaacgctaatctgccaaataaaggagaatttgaaatattgtcgatgctcttccaaagtatatataatattatcaattaaaccgaggagggtataataaataatgataaacgttagcaatatctatccatatatatctacaagtccacagtacagtctcagctacatctggattatcaaaactcgtgtgactcgcatcacatgatcaagaatcatgtgatccaaatggaaaacttaatgaaggctccaggatggtttccgaggcacttattttatctataggaataactaatctaggagtgttaccacgattggtcaaagggcagaacaataaaggtcaatatgggtacataaatcccagaggatttgtactaattcaaactgaactcagttcttgtttagtggtttttgcaaggtccaaatgcagacagtggaatgccggtatctatatgcaggtttcccgtcagttttgattgctccgatcagacgtcatcaatgcccctgacaagtggcgagacatgtcgcatatggggagccacgacatttgagtcatccggttttatgcgatttcttttccttttcaccggcgggggtaaaagtccgaccatactccgggaatcatcttccttgtctcgagcccttcagttgaactcggaccataccatagttaagatttggttatcgggactcggacattcatatgacaattatataaatagagacggaattcatgactttggttttcatattcacattcttcattactaacaaatataacttcaacttacgtcaattagttgttgctcattatattccagtacttagtattgttaaacttaccacaactacagcctattagaatctcaaacctactataagaacacaaccttaacaagtgaaaatgtcgctattcagaacactccagcactctcctgcaacattgaccatcttccacgatgccaccattcctctttccaacatcctctacaaggcattgagcagagctcatttcaacctcaaggacaactcaaagcacgagttccagatcgatttgatgcagaacaagatgcctaccttagatcaataccagtcacttgtacgcaattgtcttcctgattcgcgaagcaagtcgattttgcatggatgttatccatttttgcacgacagaaggactctgggctcgtcccactcagaaatcgtcaccactcgaggcttgggccaccacagaggagtaggccatcagtttacccaccacaagaccttttccgagggtgagtacagcattatctacgacgcattcaacaagctacacgagggtaaagctactggtaaagtggacatcgaaccctccgaaatcttcagggcacctttggtggtggactgggatcagaacaagatagcgaacgacgaagagtcattggtggaaatcttacaaaagtacaccgcagagtaaataccaaacggtatgaaaatcacgacatggtctgatcatactgattcgttccaataacgctagtgcgtttcctgttcaaaatgtggggctgaaccatttcggacatgttcagattagaatcgaatgatacgcactaataatcgcatatatatatttctcggctacagtgattatagccattaccttgatgaccttatgatatttataaaatacaacaacagaatacaataagacaaaacatatacaatatagaacacatacaataaagaataggcatactacttccaatcacaccaacactggctatgtaattgcaatataaaacagctataaatcctcgcacaccatatggtactgagagtttccaaaaagatacggccaggagacactctgttaggaaatgactataagttgtcacaatgactttctccatattcctcggcatctcccgtatatatgtttcaatacttacgggtagcttcttcttacaactgtctctcatcatgtttctaccccaggcaatgacccccacataaagatagcgcgacttttttgacagactcctgtacattcttaaattttttcagaatgaaaattccaaaccctcgacacccttaactgctgtggtacggatgcttccccatgaattccacctttgcaccagtgcttttcttgtcctggcaaatggtagatttggttgtttagccttttacttcgtcaattctctgtagtgcctttacaagaatgccctctatctccagcgtgtacttgtcgttgtacaatgccgttgctacttccgtgtggtctgccattcttattttggggcttttcgattttatcgcagctggtgcaccgtttgtagccgaggatgtcaagacatccaattactacatctcccatgtctacagtggcgatttccctcacgctgtgttagtgtatgtgcagcttgtgaactcagcttttgatatcttgcactcggctataggattggtcaaatcgccattgcttaccgtgcttcttcaaaccttggctcgttccatcattactattggaatctgctataaactcccagaagctcccgctaattggaacttgcctgcttttaccgctatcaccgtggcatggtcacttgccgagatcatacgctatggcttctatgccgtcaaattggcctgtgacgaagttccttcttggatgttctggctcaggtataatatgtttatcttgttgtacccagtgggtcttgttgcagaactgacggttgtaatttccgctctcaaatacactatgggctccagctacttcttcttcttgctctttgccttgtcgatgtacttgcccggtttcttcactctctatggccacatgttttcccagagaagaaaagtctatggtttgggtattaaacaaaagactgagtaaacggagtctctattaactgcatatatttattgtatttattagtctaactagcaatgtttgaccctaattgactttctaatatgttctcctagtctcactaaatctagacttctataagtgtaccttaatctgaatcattgatctttgtaacatctaattccgttacatttaatatatgttcatattagtcttgaattgaaatgaataaactagcttaaataacatccaagcaatcagtatgattatttggttggtgataaacaaatactgtcaccaaatgtatctaattttccagaaactatacttagggctccatcttacaaattgtctactggtgttcgcagccattccattcgatcgcagtctcgttttttctttccattttctgcgtatgcgaaaaaagaactattttcatttctattcttcatactctggaattattcatagcattcttcttagcaattgcctattcatcttcaacatgtctgaatctgcttctcatcccaagaagtggttgatcgcctacaactcgatttcagcctcgttatggactattgtgttgttcaacacaatcttcttgggttcttccctcggtcaaccatatttgtttgattacaccaacaagatcaccacctggattcagacgtttgccgttgtcgaaatcatcaattctgccactggactcgtcaaactgcctatttttacgacggctactcaagttttctctagattgttaatcgtttggggtgtgtgccagttgcttccagagtctccagctaacactcactggatctatataaccttgtctttgagttggtccatcactgagataattagatactcgtattacgctaccaacttgacttctccaggtggagttccagactggttgacctggttgagatacactaccttctacgtcttgtatcctactggcgtgtcttctgaaacttacatgatctatttgtccttgaatgaggcctcctcaatagttggtcaatggtactactacttcttaatcttcacattgttcacttacattcccggcttctacatgctctacacatacatgatcaagcagagaaagaaggtcttgggcaagtcaaaaagcaccaagaagaccgagtaggtaatatatctctgtacaagtatatagaagtgtactcggtacaaacttcggtagtactctttctacatatcctctcgaatgcagtaatgttattgcaaattatatatatctataatgcagggtggctgctcaaatcttcgagccagccgatgagttcctcgatgtaggtgtagatggtatcgttcgcttcaaattcgtactcctcgatgttgctttcgctacttcccaataacgaaccaaatgaaaaaatgcctgagcttttcttactgtttacatgcttatgtttcttgttttgttcaaataacaccttgacagatgtgaggatagataccaggtcgtatttcaccaaaagattggaaaggatcttaaccaccaaatgattaggcgtcatttggtaccatctggcattccaactaatcaacttcatcaagttgattaagatgaagtctagcgtcaagaactcttcttcaagagttttgataaatttctgatagcgttctttactggacgctttcaaaattaacttgttgctgtagaaccgaatatcataatcatcatgattaagatcgatattggtgtcgactgcatcacttaggatcaattcgtcgtagatttcaagcaattgcacagttccaaagtagtcaaatcctccatctctagctacaccaattacactggtcataagtgaacagattgattccttcaagttgtacttgaccgaccaaccaagcaagcctagcatctcccattcaatggcactatggtgcggagtaccagcagacgtcaacgtcatgatggttttcaaatcgtcgtagataaccaagaacaactgatctagccatggctcacaatttacaaggctatgtactttggaaccgtgatcaactacaaagggcaactgcaggctggatagagccgtgttcttgggacctgaaaacaacttatctttcatagtgacaatttggtcccaccctactaacgctataaacaacgatagaagatcgtagcttcgtccccaagtggatttcctagtgaaatccaacaatgacgacgtaggagttcctgaagattgcatggaaagcatatttctgcttgaataaaggccgcaaatcttaagtatcgattggtctactgatgaaatgtctctggctgaaccatttacaatgggagactggctgaagtggttgccgttgatggagtgtctcaaatgcggattgaatatgaacaagtcatgccatatcttattgatggaagcgactggtacatgacctgactctgattttattgatggagcaggaaatgttaagttgaaattcttttcgctgattggctcctcgttgtttcgtattctctgtgtgaacattgaagtatatgtctctcgggcaccagaaacagattcaatattgctttcacgggttcgaggattcaatgtcacaggtaaagagttgaaaactagaagcgctctttcaaagtcacctaccaatatgtatgtcaaaactaaactataccaacactcaaaatcaagtggaagtatttgtactgacttttgtgccaatacaagtgccatgtcgtagcgctctttggagattaggaagtacacttgctccaccaagatgagcgccagctgcgtcgtatgaacgtcaaacgtactgagatgctgatgtgaaagttcaagatagtcgtgttccttgttggatcctctttggatcttgtatatccggaggataaggtagtcccattctccaggtttgaacttggaatttatttcccttacagcaagatcgcatactgatccgctgatatcaagcttacataatctcaacaaactgtctactaagttgtttctataatggttggtctttttggggctctcattgttgtgtccacaagcagttgctgttccgtatcccggattcgagccacacagagtacctctgtttaagaattttactagcaactttacggaaacttcaagagaagcactgttctgagtgaagtccccgtagctgacgagccctgtgagttgtagcgcaggattatccaactggacgacggatcttatgatgtttgaaaccttgacttcctcccagaacagactgctcaagtcggaaatattctgcgatgtatagctcgtgttcttatgtccgtgccgcggaatcacatggtaagtagtatcgatgtgtaatggtagttttttcagggacccatacatctgaactactattctgactctgaagtccagcttagagaacacattgtaggtacaataagtcaaaaccatttccttttttgtaacggaaaaacggtctgatgtgagaatttcttccgaaaagtagtactcatcgttgtcttggacaattcccacattatggagaacgtagttttggacgtctttggatggagaatcaagacccaaaccattgacaaaatgataatatccaatatatccgtcatcttctttaccattcgagtttttaagactttcacccatgctttttgaagtgtactctgccgatcgtacaccgacatatttggcccaatggaataggtcagggggaccaagttcattgttaagtacttcgaggtacttcgttctagatcctatcagatggccaaattgcccttctcggagcaatggagcacgggagatgcgctttttttgcagtgtcaccatgctatcactcttgggaaaacttcctggcaccaatcggaactggaaaagtaaaatacagcaaataagaaggacaaacgcttaaaagttcttggtatattttgattagtttggtggtgtaaattattgagtttggatctgtgtgcaggtattcaacgtcgaccttcagcaaatcaagttgagatctacgtagtagagttgaaagagtaggaaatcaaaggactttggatgtggagatggtgttgccaaaatttgtacaaaaggttaataagttgtatttttttgttttgtcatatatataaattgtattctgatgcatatattggggcctatgcagataaaaatccttactgaagacggctccgagtttttatttctccaagacgaatgagaaatggaagtttgtgaagaatttgcttgttattttatacttgttatgataactgttatgaaaactataatgttggctatctggaactaatttaaggagcaatgggacagtggggcagagaggtgcggccacgcgtttgaatcaacctgagatgtaaaatgaatatgggaatatcaatatcatgttgtatacaatgtagttttacacataattcatagtagaaaacattttttctctatgtatcgccatgttcaacctagttttaccatctatttcttgtcgaaatgggtgggtgcaaaatctacgaaaaatagaatttgttgcagccaagtgcggcttgaaagaatcattcagaaacgtccttttaaattaactataatacactatatttactgttcatttttttttaaccaagattctctatgtagccatgtttctcttcaccacggccaccaatcttcaacatctcgcgatatgcccgaactaaaagggcaacgtcgtccatcaccatgtttagcgatttaccgcttttgatatcgagaacaccttcctctccatgggcaatactcatctgttgtctaaggtataaggtggtaacacaactttctattctggtgacaatgtgattcaatagcgcaattaaatcaccttccttgaaggtagtattcatcttttcagaaataactcccgaagaattcaggaatccctcattaacaaatgagcctccgttgaggccagaacagatgttttccaatctcaaggaaatcgttcttaaaccataaatactatcgacaggcaaggcaccgacaactctggtactcaaattgaattcttgattctgtgacatccgcttctcgaaaatctcaaatctaatcttaagtttggaagtgtataccaatgtgattggttcaggggtttccaagcccttcaactttctttctcccaatttgaagtaatggtaaccattgtcctcaatcgatgcgatttctcgttcaatgatctcaccagcacgagggttaccttgataagcatcgaataatgtcatctttccttcactaatttcttcgtgaatcttgtgcaaagcatcgaattcatccaagaagtctgaactaacagcaatttgaccaccgtctgctacagcactgatacgcgaagctctattcaccattggcccaaagtagtccattcttcctgtcaccacatcggtttcacatactggcgaaccccaatgtatacccatacgaaccgacaaacctctgaaaatgacctgacctttaccatcagtgacctcgcaacattggtccgtttccaaaatttctgagggccagtctgcagttaacaagttctgctgcacattgaaacaccagagcaaggcagatgtgggcgaagggaaggacaccatgaacgcatcaccttcggtcttgacttcataaccacctacaattctcaactgacgacgcattatcgaattgtgagtcttgatagcggatctcattggaactggataggcgtcccataacaaggtggaatttttgatatcggtaaaaactaaagccaattctcctaccgggggctcaatctcatcgtcaagacgtcttaaagatgaatcaccagttgtggctactctatctcttctcttcttagcaatcacatcagactctcttccaagattgttgtacaacccgtttgaaccaaatttcagcctgtttgatttctgctcaccaagagttatcacaataacggcaatcttatctgttgctccgtagcagatagcataatctctcaatttctgtgcggccaacattggatcgtccttttcctgtcttaaaatatcaactgcaagttcatatgaaatgtagtcccacatgatcttgttagctacaacaatcatatcatcagcagcagttaacgaaattgacgaaatatcaggaccactgtgtgtatgtggcaaatagttgaagaacccaacaccacgagcaacaggcaaatctccatccaaagcaccatcgccagagacatatccacctgaagctctaattctttcgaattcactacgacttgtaggatcgtgtctattggtaagaagtacatggtcaccgttattacgagacaaaatggctgcagtgtctccacaattggcagtgtacaattttttgtccttgatgtagatgacagtcacagaacaaccggctcttccatcgtcagcaagattcaaatcgacggcttctttcaacatctgaggggtggcagcaaatgagttgcatttcttggctgcaaggattccattaatctccttgttaagcgaaaggaaagttctgcgaagagcatcgttaatttcttcatcagacttaaccttttctagctcgtgagtgaaatgtgatacaaagagatttttcgccaaagatgagactctatgaccttggtttggtgcacctctcttaccatcaaaggtacaaataagcacttcgttttcattgcctctgaatttctggataaagacatctcggctagaaacaaattctctcaaacccatagagtcggaaacaccgtagccgatgttgtctaattcagacgatgttgtacggatacgcatttcagtgctctggtctggaactgcagtagtagtcaaagtaacatcaattagtcccaacaccttcaagtttttcaacaccaacaaactgtcaaagaattcacctgtttcttggttctttacatgactcagtttgatttcaaatctcttgttaccggagaaattcaaatatttcaagttcttgttccagtgccaactccaatcgtacggccaattggagatgttgtacttcaattgattagaaccaacatccaaatgttgtaaattggtgagtttactcaattcagctggcaaagagaccaatttgttattgttgacgaataagagtttcaatgcctttaagttttccaaatcatctgctggcaatgtcgcaatttcatttcctgataaataaacttctgtcaaacgagttaatcttcgcattgcaccttcagggatttcaagaatatcgttatacgacaaattcaacgacttcaacgaaaccaaaaatgaaatggactcaaaacagtcatcgcccaatctattatctgctagcgtcaaaactagtaagctatcagccatcgatgtaaaggaggttccaaatgtcgaagacgagctactttgctcgtccatgtcgtaatcgttgtcaaccgattctgcaccattcttattagaatccagatctgaagcaaaattactagatggacgtctggaatcaatctcagaaacaggggtcatgctacttattccaccatccacagtgaagtttctaaagttcaccgtagaagacactctcttggcaactgatatgggaggcttagggaaagagctcaaaatgttcgaagaaacatttaataccgacaatgacttcaagagccagatatcatcaggcaaagattgcaaattatttgaatgtatatccaagatttgcaaggacgacaattttccgatagtagatggcaaagacagtaagttatttccaaaaacggataacgacgccaacttttgcaaattccctaattcattgggcaaagtaaccaaatggttcttatctaacacaaatttctcgatgtttggaattttagttatgaactcgtcaggaatagacgtaattttggctttggacaagtccactatagttagatattgaagcatattgtcaaaatgcaaggatgtgatggggtttctatcaaagtgaagcaatctcatgttctccatctggtcaacgaaagctgacacattgttcttcgagaaataggctacttccaaattaggcaaagaacccaatacatcgacgttggaaaggaggttataacgaatatctaatcttttcaatgctgtcattttagcaaaataatccggaagcgacttactcaacttgtttgtgcaaagattcaactttgataagtttgtcaacttgttgatggattctggtaaactcgccaaatcattgtaggacatgtccaaatctttcaaattgcttaattcggagatagactctggatatacgctgaaatagttggatgataagtttaagacttccaagttcttcaatcttgaaaaggatttaggcaaagtagtcaattgattagagttcaattttaaatgagtcaagttctttaagtgactgaatttggatggtaaatcgtccaagaaatttttctccatgtcaaggtgggtcaactttttggcttcaaggaaattcaaaggaaacttagaacagccattcttggagaagttgatgctaatcaagttattgcacgattggatgaagtcaagtggaatatatattgatgggttgtcggccacattcaatttttctatttcgtaggtgtgttgatggaagattatgggtatgttcttcaagtttaggccagctatgttgacgtcgacgtagtctctcgacaacatagtttcttcttcatgggtcaagtttcttaagtttatattttcaaccacaaacttgcacaaatacgataaatcttctcttccaattatcttcaagttatcattatctgtataaccactcaacaatagcaagcccaattggatttttagtggtttttcgaacggttccaataccttgacacaattgccaatataaaccgaaatctggtagttggagatagattccaagaagaacttacgttgggcaattgccaacaattcggctgtcgtagtttctaaagaacacaagatggttgtgaatgtgttgtcctctctaaaaacacgaacaatatggttagggggttttcccgtttttgaatcaagctcaccttgaattatatgagacagttgtcgggtaccatatagcactggcaagtcagacattcttctgaactcctgtctttctacaagttttttctgcaaatggtggccctcatcatgactatcgttcagtgatatgcttccaatagaagatgatagcgaacccacatcaagatggttatgaatatcgtcattgacttccttttcatccgtatcgtcagagtcagaaagtgccaaatctattgttcgtatagggttcatgttctggtcgagctgaacatcccaactgtcaggagccttccacacagccttactctctggaacaggaccagcgggtccagagatgctaccagtacctaaactttgtatcagcaactgcgatttttgagtagcaatgttgcctctgccatcgtgtatggcttcagctgcgttggtggaagaatccgaaaacgagctcttgtttctgggatcttccggcagtttgatgatcccgtgcatttcgtcaaggttcatatctaagtcaaacgttgttcccaccaccttagctgaatctgaatccagctctttgggttcctctttgatagaaggcgatataggtgttgttgggacagcagaagtcagagctgctcgttgaggtgccaatgcttcctccaacatacgcagaaactgttcatggcccacaagagaagggtgatgaggatgatgatgatggtggtggtggtgttctaatgaaattgacggcattctgaacttgtgtttagagacagtatctgcagtgtcggagctggcactttttcgctgggacagaggctgttgtgggccgatggctgtgcctagcgaagcagaaagagattgtgctctatgagaagtagaaggaaccgaagacgaaggtgacccagaaactccagaaatagaagcagaagcagaaacggagccactagaaacggcaccagctgcaggagtagagagagaacccagcgctggcgagtttgaaagagctcctacagtaatcgagttatttctgctagtcacgggtgtagttacatcgtgttccgtgattggctccgatttggtcgtttcgccagagtgtgctgaagaatctgaatctttacgactcgaatagatgagtttacctaaaagggagccactcttcttcttgaaccgcggcttgattggctgcgacaacggaggtatattggcaattgctttgggccgcctgttggcgtggaagccgcggtaattgtctttcaagctggaaacactatcgttcccactgtcagctacatccagcggtggcccttcagatggcaaagacacgatagaagaacgcggcagataggtatccgtgtttttacggagcaatggcgaccggtctactggcgatcttccagtagccttgtgctcgtatttatagttgaagagctggtcgtcgttggcgggatttgatacggaattcaccagagactgcgatgacatggtaggcgacagctcaatcgtcagtctcattttcgtcccggaagtctgtgcattcgaattgacattggaattgacttgggaattgctattcgtcgcattggctatgttggggagagtagtgctgttactactagttctttcatttccagtaccagtagtcactttctgactgacgattgtccctgttgctaaggctgattgctgtattgacgtcaaattggccgtgggagaaagcggcctgtcgatatcatatgctgtcgaattctgtatcgctgaagcactgctgccgtgatgctgctggaaaatcagattcagctggtgaaccagagccaggtgtcgctcgtgctcagccagttctgaggaggccagaagagagaactgcgacttcaagttgttcttggacttgtcgcgtcgaaggaaactcatggtcaaatggaattcttggagctgaaggaaacagcattcatctacaatcagttaactaatggaaaaaaaaggatcgaactggtatatagttatcacgtgatacattacggggcgtcgtggggccgctggaatggacgttgttatcgcgagaggcacgtgatgacaggaaagagatgataggctggtattgtcttatggtctccccgatacagtggaagtagaatatgtcccacagtaaagttgtaatagatgtctaagttcgcagctgctggtatgatagtactgatgtatacttttaaggagtacattaagttacttttaaggtgcagtatagtgtgtattgattcgttggtgatatatttataaaaagtccgctaaatactgaaattacactacggcctataatacaagaaacaatgagataagatctccatccagacattacttattagataattgtagcgctgtcgtctgctaatgaaatgtttattcgtacaaatttagtggttggttgcgaaataatgagaaattgcagcgcagtatacttttcgcatccatgtgatttgcacccaaatgcaggcggtccataccgtcaacgacttgcaaaaggtatgacttacgaccgttggtgtgatggcagatatgtgcttggctgattttacgggacgtgtgtttcggacgtgttgtgtttaacgttggtgtggtgttcatcgcaggaagctgtatacatcatagggcagcagctggcagttagctactgcaccaaaactgaagggccatagttaaccaccttgtggagatgtagggtgcagcctcaatctaatggcaactagaaccagagtctgaagcgcggtagggggtattgttctaatagatcaaaatatccagcagactctgggagatacagacgaagcctagagaatcgtcagatgtacaatagacatgcaaagtagcagataaatgcgtagacaacggagacaaacatacaggtgtcacagaatctagactaacagctatctgactactttacaagatgatatgtccatagacccatgctcacgtctggaccctcctgtagagaagtttttgtagctggtactggccgcctcgttagtgtattctgagcagaatcttctcaatagggacaaattcgcagtggcacaaacatcaaatagacgagcaaggttacctgatttcgtagcaattgagtaatgattcggggggatacggttgaatcgaatttgtaggtgctttcttttcttgatcattagctccctttgatagtcttgaacttagcaaaggtcttgtagagtctcttgacttcaactatacacccactattttatacgttttcacagtttttgtcttttgaagattcaattgtttcacagcttgggattgtggttgtcgctcttttttcgtccccaggtcgtgcttttaatgttcaggtgaaatccacccgccattattatattattgtttgacgtgtcccatacaggtcttggttgtttccattgtgatttgatttgatttaattgtctttgactacttcttgtttacttgtcactttcaacttcatctcgttgtctccagttttttctatactctgctctgctggatatgactgactcttctcgaagcataaaccacaagctcaacgagttgttgagcaaaagtacgttctacttcctgctggaaagtgaaaaattcgcaagatcaacttgtgaaaaacaaacctgaaatttcaacatgactaacactgtcttttctagccaccgtcaacaaggccaaactcgatgccccgacctcgctcaactatgctgctatcctccgagccaacatactcggcaaggataaacaggaaaaggtcaattctattgtggttctagctaaactcttggattgcatactaggctccgaagccgtttccagtcagttctcgacggtgatggaccgcacgttgttcacgacccttttctctatcatcagctccaacatgtcgtcggagacatacaaggccatcttgaagatcacgggaatcgttgtttccggaggaatctttgtagctaaggaagactcactcgataagtacttgcctgtgttcgagtcgttgatcgagtacttggacgttatcgatatcgtcactcacaagctctatctccaagacagcaagattacatacaactccataaagttggtcacggacttgatcaacaaggcacttaggttcaagtatgatgggatcatcactttagcgggtcgaatgaagcatgtcacctttttcagcaccgtaggcaacctcattgagactgacgacaagtccatcttagatgccaccgagtatctcaagatcgcatactacaacttgaacgaatatttgaacaactccagattcgacttgtccattaagtcacaccaggtcatgttgaacaacctctttatctacttggaagtgtcgttaaacgagtacggcacaccagctacgaccgaagaatatatcaaagcgggcttcaccgaaaatccgcgtaattttgtcatcgaaaatttctcgttattgttggccatgaacctcaagatcttcttgaaagaccctaatttcacattcaaaaagaggttccatgaagagttgatgatgagcaaccattctaggacctttccattattcttgttcatggacagatgtacccagatgtggatcgacatatttcacagaaaagacaagtacccctttatatattcttctgtgttgagctgggagttaatgatatactacaccatgaacaactgcttgatcttgtggcaggaaacaaaggcacaactagacaacggactggacattgataagatcttccagttgctcctttcaaacatagactcattggaaatcgagatgtccaagaaattgaagtccgtggaggattgtcttgatataacttcatctaagactggcgaagaaatgagacgtacccaagtattgcgaattaaggaccagcagatgaatcaatggaagcccaaattcaccgagttcaacaaagtattggctacagaagtgttagactttgtgtcggagcaaagagtaatacagttgcttaagggttcttgggtctttaccgaagctcatggagaaagcactttacgaaataccaacttgaggaaaggtgcatatcccaagtattacttccttacccttgcacctaacagaacagccatttactataaggaataccttgaaaagcctgcgttaaatccatcctacgaagaattagaaggcagagccatccgtctaagagatatacatgaattcagctctacaaaggtcggtgagcacataggagaagaagaaaagagacacaacagtatgctaatttccatcaaggggacgatttcctacgagagaatcacgctattaggagaaaacaacaagaaattgttaagtttctataccgacacagaagtcaacaagtacgtttggctagatggccttaaaatgttaaaggggatgttcagtcctggccaattgtcaaacgacacccaaagacagatagaattattaattgacataagaagaaacacccagttgcttgcattagaaaataaaagcgtcaaaccgtccgcgactgacgatgatgaggatgacgagtactatgacttggacgagttgacggctattacggacaatttccactatagataggatatatatattaaaatcaatagttgcaaaatgtcgcagcaacttgtcatgatgacgacataattacacgacatcacagataccagatcaagtaaaagacgacaccagtcggagaggcaacaattcaatagcgagatttatattggcttgacatatgttatgagtctaattccaatgttaaagtagtccttatttccggtttcttctttattctttattctttattcttaactactattatagaaatgcgatggagaatatgatctgcaggatcacaaatttatttctgcgatgtgaaaaatctcagaaactcatctcatagaactcagaagaaattagcagcaagaacctcacaaaagtcaaaaatggcagctaaggacgatttaatcttgaccatcgatagtgatggtgatgaaatcgtgtattccgaagaatcggaagcggaagtcgaaatttcagtgaaaaaagtgaaaaataagaaaaataaaaagtccaaagcccagccacaacaaaaagaagaagacgaagaaaagaatgaagacattaacccaaattttattttctcgttagatgggattgaaactacttctaagttcgacggttgggacttcagtgtcgacagaaatgcaaacgaggttgcgaacaaggaagttgacttggatggaatcttgagaagaaaaggtggtttagtcagtttggctggatcagatgctcaaaaggaagaggaagtagaagatgaggaagaagaagaaaatgatgaagatatccaaaatgaagatgaggatgaaggtgaagaagaactcgctttggatggttttggaatgggcgcagaagagaaggtcattgatgaagaggatgaagaggatgaagaggatgaaaatgacaagtcagatggtgaggacgacaaggacaccgaggttgaggtctctgaagagggcgaagaagagaatgatgaggatactgctgaagctatggcagaattctatgctgatgaaaaagaaaccaaatcggccaaatcacaggtgcacacaacgttccagacattgcagttatccagacctgtgttgaagggtttatcgcaactcggttataccaagccatctccaattcaatctgcctcgattccaattgcattattgggaagagatatcgttgctggtgccgtcactggttccggtaagactgccgcatacatgatcccaatcattgaaagattattgtacaagcccagcaaagttgcatctactagagtaattgtgttgactcctaccagagaacttgccattcaagtcggtgatgttggaaagaagattggacaatttgtcaacaacttgaactttggtttggctgttggtggtcttaacttaagacagcaagagcaacaattgaagtccagaccagatgtagttattgctactccaggtagattaattgaccatattagaaattctccctcgttttcgatcgattcgttggaagtgttggtcattgacgaagccgatcgtatgcttgacgaaggtttccaggtcgaattgacagaaattttgtccctcataccgaagaacaagagacagaccttgttattctcggctactatgaataccaagattcaggatttaatccaattgtctcttcagagaccagttcgtattatgattgatccaccaaaaactgctgctaccaagttgacccaggaattcgttcgtattaggaaaagagaccatttgaagccagccctacttttccaattgttgaagaaattagatccagcacagcagagtagaatagtggtatttgtttcgagaaaggaatctgcccacaagttaagaatcgtgttgggtttgttgggaatgaaggtttctgaattgcatggttctttgacacaggaacaacgtcttaataatgttaatgatttcaaaaagttgattgttccagtattgatctgtaccgatttagctgccagaggtttggatattccgaagatcgaaattgtcatcaactacgacatgccaaagtcgcacgaagtatacttgcatagagttggtagaactgcaagagctggtagagatggtacatccatatcgtttgtaggagaatctaccctggacagaaatattgttaaagatgctataaagtcgttggaaggaggagaagtcaaaggtaaagcagtttctcgtaatatcgattgggtcgatgtcgagcaattgaataagattgttgagtctaagcaagagatcatcgaagaagtattagacgaagaaaagcaagccaaggagatacttcaggcagaaatgcagttggccaaggctagcaacatgatgaagcacgaaaaagagatccagtctcgtccaaagagaacctggtttgagtctgaaaaggacaagaagaagcaccaaactgaagtcatgcaacaattgaccaagcacggcaagaaggtcaattcgaagaagagaaaggccatcgaagtgaagaaggatgatggaggaagatcgtacaagaaaactaaggttgacagaataacagaccagaaacgtaaccccaaggccaaaataggcaatgggtcatctaagggcggaaagagaagaaagtaaatagacggatagattgtagccactgtaaaatagatccatataaaacagaccatatcatagtagaactgtagtaacgaacagtagttgcaagcaattcaagaaattcacgtgaccactataatcgcaccaaaatgcaccttaactgaaaaacacatcaaatgaggtgaattcatgattctctgctttctatagtccatatacatacacaaactggtcctcattcttcaatatgatattctccaacggatatacgaggatattgggaaactaccaatcaaacgatatcaccaatccttccaaacttctctttcagatagtcattctacaatgtttctactatatatcggcattagtgattttctacttagtggcgtctcttaatgggtacgactttaagatggactggattttcctgtgggaattggtggcactggacaacgccatgggtttgattctttttgccatgtggttgtttgattctcttctttgtgtgttgttcgttacaattattgtaggcagatcgaaattggcctgggacttcgccattactgtacacatcattaatttgattgtggtgtggttgtattcgcgtcattttcccacgtctatcttgtggtggtgcttgcaagtattgagtgccgtcatcttggtgacgttatcgacatatctgactcgttggaaagagttgaggactaccttcttcgacaacatgcttgaccaacaggaattaggtcaggtgcgtcatgactcgaatgctcctatagagatgaacgttctccccaaggtgccggaactgtctctgtcactgacataatttcaaacggttttagctaatacatttgcataatatacattgacttgtatcgttatagtctttattgcttgtagaattgcatcgagaagtgtatctgcccggtacggatggttaaaagtttagatccgggttttggtggaatctattatttgttaacaccgaacttgttaaaagtgaatttcaaagcaaacctctcttaaagtgattgaaccaaagagtgatttttatttcacctttattaccaggaagtctccttcaccagccaaagctttgataacaatgaatgagttctcatggcttgctctactagtaaaataagtctgcaagtagcaattagaagctccaacataacaaaacacttcgctcattcatttatcaaatcatcttgcagcatatatcttgcgtgaactgtatacctaaggtttaatcttcctccggcaactcaattcaagagcttgtgaagacctcgctcgcgtaactcttaggagaatagtacacttcgaattcacaattccttgatatggctcatactttttgcaactgtagcgccatttttttcaccaaaatgtatgaagtgaggaaaggctcacttaactctcgactacggcatctatttaagaggggtctcggtgagacttggtaaataaaatttcctacaggctatttttttaagggaggtttacttttatgaaattcaccatactaagcgatgaacatcttctattataaatcactgattattaaacagaatatggaactcaagtcagctataacccaccaacatcaccatgacagccaaaactagacagagaaagtcgtatctgtgtatcaattgcagagataagaaacgcaagtgtgatagaggaaagccctgttcttcttgtgtaaggctgggaatagcttcaacatgtaaatacaacacaccgacacttaccgtgctaggaccagcgtccatcttatatgataacgaaaatgcttccagtctagaaccagaaggtgaagatgatataagagacttcttgagactcaagaatcctgtcggaatacctggaggcaagatcaacttcttcaagctcttgtgcaacaacttgatagagccagattacaatgtgttttcgtggattaatgtctacaaatcggacccgggaatgaggatctacttgaagaaccttcctctgaatagcaagctctttgtagaacaagtagtagtagacgacttccacagagacgatattttcaagggtcttctcaatcttgaattggacgaattgtacagacggtcggtgggcccggacctggagaacaagataatacacaacgaagaggaattgctactcgccatcagatcagtattgccaaataccgtaattatagcaacccatgtggaaaagttcttctctgaactataccccggttttccatttttagatgaaagcgcatttaggaaaaggctaatgagaatgggtaatggacctcgaataacagacgagaatgactgggccatcattggtatattacttataatggtgagaataagctatttgtccagtctctggaacatatctggcagtgataggttaggagctgttgcaaacagagccgactacgagcttgtactgtcggctactataggccctgaatttattcgattagcaagaagttgtttaaagcaatatgatctccagtctagaaattcgttgtgggttctacaatgcaatatcttcctccagatctatgagcgggtttcgcctgaggaaggagagtgtgctacaggaaaaagcagtcaaatcattcatgcctcgttgattcagcatgcactatcattaaagctccacattgacccagacttgctccctcagctatacggcaagaatgaaaagtacaagaatctcgtgagaaagatttggcatttcctcgtttcttatgattattttgatagtattagctacggcaattatccttcgactacaaaaatggtgtttaatacaaggctaccaactcatattgaaggaaatgagaatattcaggatacaaagttggaaaaggaagttcttggttcgtttgaatttctcgacttcacttatggaccagtgcatgaccttttagttgatatccagagcttgaaaaccgatcataaaattgagagaatagtttttcttgcaactgcaatagagtctactattgcttcaataattggacaagttgatacctttttttctgttgaaacgaatcccagtacagataaaggaattagatttgctctctttctatacctcaagttctttcttttaacaattttttcttatctacagctgtattatgagaggactaagcagtatgaaacggcatttttctacttcaagaaagtattaattattggatcttatgaaatattgccagcaatgtttagattggttggttcatttggagaccacttcaagaaagagacattcatgttgactccccagattatccaattgtcatgtcacagactaatcattaccttagtttcagcatttattcgaatcgaaattactttgaagagcaatggtcaggagctatcaggtctacatggggtaaagatcaaagtattgcagatacttcatttgtttcttgtcaacgcgtctgcgttgagtatctatgtacattatacgtggagagtgaaaaaggcactagaatttgcattgaggaagatttttgacggacagctctacaaacttcaaaatttgacagaattagagatatcaaaggcagaattgaaaattctgaaggaacaagttgctgatttagacaaggcattacaatcagctcttctagcaatagagaaagcttggaaaccttcacttccaattccatttgcgtcgattgataacttggattacatttacggacctaaaaacagagcacccttcgaagcgtatgatcgatccgaaccagatagaatgtggtacaaagtttctagttgcatgagtaatgggtccaatctgaagattagtcgaaataatattcctaataagctacaactaaacaacgttgaatatgacttcaacatcttcaaagggatgacatttgtggaacagggctaggagtgctccgcattgctagccaattatccctaactccaaaaagggggactaacaatgtcatggggtatttttgttacacaaactgaaggttggtctgaagtggggcattcccccacgctcagtaggaggggcatcagtttcagcgcgcattaaccagccaaagaattgaaaagttgggtataccagaatagacttcatagcaatgtaattaataataaatgaaagtatcagaatctctaaatgtaatagttcgaatcagcttgcctcaaggttaaatgcagaaatactcccgccagacttctaactgctgttccacgagaaaaaaaattcaacttcctaattgctttcgacaaaggaaggtatcagacagcagagttggacatctagagcgaatgcactgagtgccccactaacaaggaatatggtgcctatgcctggtcagatgggcatttttgccaatgcattacccctcatacaacaaaagtgagggagagtggggccgccccagatgtcggtcgtttgcaatggacccttttgaaaaagtaaacgcgaacggcccatttaccttccagttgcagatcagatggggatattatccaaggataggcaataccttacccctcatacaacaaaaataatggagagtggggccgccccagatgtctgtcgtttgcaactaaccctctcagaagaagttagcgtgaacggcctccacagttagcttataaccagcagatcggaaatgcccccatttctcctattggatagtcattgatgatcgccttgagtggtacggataagtatgtttctgtattagcttattttcatcatgcttgtgaatttcggcgcaattactctggtagtcttgatttgaattctcggtaacttggtagtgctccacatcaccggatcgagtggccatgactttttttttgtttgcttgctgagctactttggtggggcaggtgttctacggtcgtgttggtggggaagtttgttgaaaccaaatgtataaattcaaggcatttgctggtgatgatgacgtaaaaattgtttgtcttctatagtattttaaacttaaatcacgttatacatctgaatcacattcataatggctttcaacttcactgacaaggttgttatcgtcaccggcggtctttccggtattggtcttgctgctaccatcaagttgcttgacgctggcgctaaagttatcatcggtgatattcaagacgctgaggctgccaagccaatcgtagaaggtatcatcgctaagactggcaagaaggatgttgtccacttccaaatcgatgtcaccaactatgaccaaaaccaggccatgattgactttgctgtcaagacctttggtgacttgcatcatgttttcgccaacgctggtatcaataagcactcctacgctcacgaaatgtccttcgacttgtggaagaaagttcttgatgtcaacttgaattctgtcttcgctttggacaagctcgctatcaagtactggttggagaacgacaagaagggttctattgtaaacacctcctctatgctctctaacattgccaacttgggtatggcccactactgtgcatctaaggctggtgtaaagcttttgaccaaatctttggcagttgaatacggtagaaagggtatcagagtcaacgctgtcgacccagcctacatcaagactccattattggacatcttaccacaagaccaatatgacgctttggtctccttgcatccaattggtagattaggtgagccagaagaagttgcttctgctgtcctattcttgttgtctgacgaagcatcgtatgttaacggtgcctccttgttagttgacggtgcttacactgcacaataagcgcattcatatagatttatttcaacatgtataaaatcataagttaataaaaagaatggatatagcatggtatagaatgttatagaagaatactaaattttatttccaagacaatgaattgactatgtagcccataatttcatatatagacattgctatctagatcaaactgtggatcaagtacttaaccatttatattcggctagtaatcaatttacataaatagttcgcactttaaatcttagttaggcaaatgacaaaatgatttattttatgcattaaaaaactgcaaaactgtctattaaaaattgatcaattttagggcacggataatttcataaacaccaaaagcaccagggtctggtggaaaaaccgtttgttcatcaataccaacataggtagcacgccccaactttggagcaagctttcttgtgttttcagcggattcttctgcgacttggactgcagtcaggatatctttggaagcgtagaatgcagctacaaatggaatcaaaacatccataacggttctgtgaccctgcctggccttggtaaattgacaaagagtagaaacaccgtggttcaatgcttcggcataggtgctgctgtctacgactataccactttcaactaattgctcgaacttgttgacgaaagccttcatgaagatgaatagaatagcacccaaagtaccacccatgtcgtctctgatgatcttcaagataaccttgaaagcatttaaggcagaaccaccttcgaaatcgccacgtttaagagcatcgagaaccgcgttggcgccagtttccaaggtcttaccgcaatctccgtcgcccatctttgtatcccagaaggtgatatcaggttctctctcaatgacattcttagcagcggtttctacaatctggttaagaagagattgctcaactttgacgtcattcttggatgtagtggtctcagcagactctggataaccttcgaatgaggtgacgactctgttcttgtaggtgcttctacctggggtagagtagtgggagtgagaccaaccgttagcaatagttgggtcgtcgagtaatttgaacaaaaggtctctgtcaaacttggcagtggcagccttggtgacgttgaacaatgtgatggtgaagattggagcattcaaggatgtgataaaaggacctgagtagaccctagatggtaagataccgtacttggattcaaggacgtcggcaacggtgaataacaaggacttttcctcaatgactgaaataccaccaagattgttaaacaagaggacaacttcgtcaccttgttcgtagttgaagaaacctctctctgggtcttcagtatcgaagatgtagctcaacaactttggaatcaactcttcgttggatggtatttggtcgaccttgcgaacacctggttcattatgaatacctaaaccgatttcaatctggttcgcatcgagcttaccatagtcttcctcggaagaatgacccggaatgtgtacgtggtccaaccctgcgtttatggaagcgatttgggcattgacgtttgtaccaacttcgtatacatcgtcgatgttgtagcctctttcggaagcagcacccatgatcttagtgaccaaagcacagccagccaaagtacgacgaccaaccaaagcacccttagttctgccaacagcgacatcgtcagtgactctcaatagtttgatcttatcttcaccgtatctagaaatcaactcctgtgatgccataccgaagtaaagattgtccccagtgtaattagtgatgatgaaaatggtaccagcttctgagtgggtagccttctccgcgcaaacaatgttcttgtcgtttggagatgcgaaaacatcaccttgggcagcagcagtaagcattccagcaccgacaaaaccagaccaacctggctcgtgacccgaaccaccaccactgatcaaggacaccttcctagggtcatattggttgttgaagatgaccttctctttttccaaaagagacaagttgtcattctccaaaagcaagcccttaaggcagtttggcaccaattgagcaacattgtttggtaagaagtgcttggacatgttgaattctgctataaagtaatagaccaaagctaataaaaaatccccattgcgacttaaatctctggaaaatgtaaatagtttataaatcgcgtcgtcagtgccattggattctaaactttcactttggatttgtagtctcgtcccgctttctgcatcaaatgagggggcggagagctagaattcatggagctgagggagaaatatcggtactatccaacttctgaagttgtccaaccccaaaatccaccctgagcgggggcggggtagcggggcaaatactcaagtggggtaatatatgcatttacttttttttttttttttgcagaaccctggtgcacaccatactattttgcttagtttggctttcgaaggcagtacatattacgagataattttcggagttatgctttgtagtaagattggaattgtgattgaatgtgcaattgttgtaaatagtgaagtgcgtggtcctccactttgccccgctcctctgtgacgccccccgatgaggggttctgcttttctgcactgaatgtttagtgagttagtaataatagaaatacttccaaaattcttataattggctggaatccgttcgttgcaaagttcatccctcattctccttaactaggttgacttagtatcttatacccaaaccaacatgactactgctgggctcagaattgtcattggttgcgatgaagcaggtttcgaatataagcaaaagctccagcaagaccttgaaaagaatgacttggtatctgaagttatagacattggtattaatactaaaggtgatcatctcgcgtaccctcatgttggtatcaaggctggtgaattaatcagagatggaaaggctgacagagccttattgatctgtggtactggtttaggggtagcaatcagtgcaaacaaggttgctggtattagagctgtaactgcacatgacagcttcagtgtcgaaagaagtatcctttctaacaattgtcatgtcttgtgtatgggtcaaagagtgataggtattgaattggctagaagattagtggcagaatggttgacttacaatttcgatgaatccagcgcctctgcctcaaaagtagctgttctcaaaagatatgaatccatctgttaatagtggaaaatctaatagaatctaaaccaactaacttgcttcaatactgtcggtacatatagaatgatgaatagtacacaattctgttataataatcctacagcaatagaattttgtagaaccatccaaatgatgtcataaacagcctacttccttgaggataatgtttgtacaagtctagtaagtgttcaatatacaggcttgcaagtatttcccccttcatcttctacgtatgtaccattgaaggtgtcagttgccagtaccaattttcttgcactagattttctgaaatctgggggaggtgcatacgataagattttttttgtggggtagggagaggctaaaaactctgagtgccccacgtatgacatgcaggatttgtcataaatcatcctgcacacggatgacatgcaagaaggacttctggtgcccctcgtcgatgttcttaggcaatgaaacagccaaactacgaaataagccccaaaaaaagctttaaataaaccaagagtttgatggttgtggacaataacagttcaatagtggatagcagaaattgtacacatttagacagaatagtaagaaatgtattgaaatcttctgcatcgtagattatcagcagaaagacaactacagaagttgtatgaagcattcctttgggagaatagtcctgaaaattgattatgtttaagctgagattaaggatatgagcaaatcgtaactaaagtgaaagacacattctccttatctttccttatcgaaatctaaagcatattccacttacaagtggaacacgaaaagtaagtcgtttgcaattacccgtgtgatatttttgtggacccaatctggaattattggtgcatttaaggctacaatcaactcgcccggaaccgctcgagttcgcaataaaatttagaaagtgtaggtcgttttcaggggtacaacaacaaaagtacttgatttccaacaaactgggtatatgcttaaatacttaaactggaagaaaatatgaaaggtttgacattttctcattttgcttaggattcgtaaagcattgaacagtttatatcgatactgcaaaatttatttgaaatttacgtatgtattgataccagaggtgaacctccaactagaatctcagtcattactgcttatcaattgtagaatggatcacctgctgtctctagctagaattttgaatcgtctacaagtacatctcctgtcgaataccatctactgattatctaataatgtgatatatggtactatgcataaatagaatcaggccatttcttcaacacatcgtgtactatctataattttggattagtttgcaagacaactaatagtattcgtctccttgattttataattagaatcccgaagtgtagtctcgtatttacagtgagtgtcttcaaccgcaaggattatagaaactactagaaataggaagatctagaagatgttgacttttagtgttattgtcattgattatcccaacgtgaaatagctggtagttgaaatagctggtatgtgagtaaagaggattattgggttgttctcaaatcaccttcgggacaatgcaagcgcagtttcaactttattagatttgggcaacgcggctcgtgaacttcagagattagactgccattgtttattggtaccatactactgtatgattttagccacactacttcaagaataagggaaaaagataacgaaaatactttaaattctgcgaagtgtttcaacgattccgtaagagcgttttcttttttctacgtctatagctatgctttacaaagctcaagagtttcaaccacaagttggaatgataatatacactataatacgacgtttattctacggttcttagtatttccttaggaactagctaaaattgtgttgtgtaatgttctggaacttgtataatttttccgagtattttgtggtaatttttcttatctttcgtttgcaatgcaggccaagataagatgacagtatctgatgagaaaatttgcaacaaacttggtgacttcttgatttcacgttcattataagaacacccccgttcaggaacacccccgttcaggaacacccccgttcaggaacaccataaccggaagtcaattcctgtctttttatcaagtgtggattacaaatcatctacggctccaagataacgaaagatacatcaataacgatgtcaggggcgcaaatgctatagataagcaaaaatgtgagcctttaggatctttatcttaccttttataaaaagaataatgtcacttcaaaatttagcttaggatgtagataatctactgacctcaaacttaatcgttcataatggaaaacttcgtgagagccttccaaaagggcagttcaaagaacaacgacttgggagaagtcaaaaccaattcaatcacagatgatgatttagaggggatggtcaacttcaaaaaaggtggcgaacatatcacagtcgaagaggttgacgacgaaaatcctatattcaaggaagatagaaatcgtttgtcacaagaccttagatccagacatctacaaatgattgccatctgtggtgtatttgggacaggaattttcttgagttcgggcacagtttactctctcactggggcaggtggttgtttcttggcttacgccttggtggcagtagttgttggcatcaaccaaattgctattgcagaagtagctgctcttatgcctacatcttctgcagttgttcgtcatttagagcacttcgttgacccagctatgggttttgcctatggttggatattgtggtggggcgcaagtatgccgggagaaatttcagcagctgcggtaattgtctcctactggactgacatcaatggtgctgcctggatctccatcatcattgtacttctgtttgcaagtaacgcatactcgatgagggtgtatggtgaaatagaatttttcttcgctattctaaagttgtccttgcttttgggtttaattattgtctctattataataacatctggtggtggacccaaccacgaagcaataggattcagatactggagggatcctgatgcatttttaccattcttgacgactggcagtttaggacgatttgctgcgttctggaaatcattgagttccgttgtatactcatacggaggtgttcaatctgttccaactttggccagcgaggtccgttatccacggaggtcagtgttcaaagcctgcaaaagaatcttcttcagagttaccatactaatgatattagctgcattcagtttgactttgattgtttctccagaagataagaatatcacatctggaagtggcaacgccaagtcatcaccatttgtggtggccatcaaaaatgcaggtatccctgcattgccccatattgtcaacgccgttgtattgacatctgccttctccgcaggaaataacaacgtagtccagggaactagatgtttatttgctatggctgtgaagggacaagctcccaagattttcttgaaaacaacgaaaaggggaattcctttgaatgctttgcttcttgtcaccttgttcatgccacttgcattcatgtctgtttcagaatcagctgctaatgtctttaattggttccaaaacctaacatcatctaatttacttctaggatggattttgatcggcttgaaccatgtttccatgcatagagcaatgtgggcccaagggtatacgagagcagatttaccacacacatttccaggaggacaatactctggatatgtgtcgggtgtaatttcattgattttgttgctaactggtggcttcactaactttgtccatggtcacttcgccattgcttcgtttttctcttcttactttgtgattcctttgactttggtattattcttgttctggaaattctttaagaaaacaaaatacttgagaccggaagatgttgatttgaattccttattcatggacgttcaaaggaatcccgaacctcttgaagaaccgcttcgtggatggaggctcttgacattattgtggaactaggttactttgtagcacaagtgatgtgaatgtattgaattgtgggtgtcatttgtagtggtacctttgctagtgaatacatattctgaatgtaataaaagaacagatagtctctcgatatacggcgtaaagagatcaagttcaaaatttagtagcaagcaaagtctactagcataaccaacgtgaacaatatttgcaatgattctagacttctcgggtaattactgtgagaaccagtggcagaatcatataattccaaaaattctgtatcatatcatacgtctatgtcctttagtagtcgtattattgaatcaagtattgctgtagtcttgctgtgtctttctcttagaattgcgctcgttgcatcgtgaagcgcggaaatacggcaagctacaaaatatacaatcgacaatgtgacttatagtacacgcttgtgcggagaagtaagacatttctacactaaaaatgaatgtccccgcaaaactattttaagtccgttccagtactaatggccctgagagtatagaaaggggctggaattctcattgtaacgacaaaaggtgctggtttgagtttggattattcgactcgtagagagaataggattcagaagcattgtgcaattagatcttgagagatatgacagtcgaaacaatcgtccagtacttgctgtgttggcaagtatacgttcttgcagtattggtctaccacattttcaactggattcacgaacaaatattgtacaagaagtttggagcttctccttgtatcaacaatgaaagaggaggcttccttggtatcagacttttgaggacgttgttgaaggcgaagctggacggaacgctatcggatgttgtgaagaatagatactacgaaatggaacatcctgaaatagaaacgtttacgctgagagtgttttcacaaaccgtcattgcaacaagagatcctgccaatctcaaggccattttggctactcaattcaatgactttagtttgggcattagacatgctcagttatatccgttgttgggagatggtatctttactttagatggtgaaggatggaaacattccagagccatgttgagaccacaatttgccaaggagcagattgcacatgttcagtcgttagagccacatattcaagtgttggcaaaacatattcgaaaatcagaaggaaagtcgttcgaaatgcaagaattgtttttcaggttaactctcgattgtgctacagaattcttgttcggcgaatcagtcgaatcattaagagatgcatcaattgggatggcgcgagctgatgtggaagttgaaggaaaagaccggtttgcagaagcgtttaacttagcccagacccaaattgctacgagatcgatgatgaacaaaatgtacttcctatacaatacggaagaattacggaattcttgcgatgttgttcacagattcacagattactatgtcaaccttgctttgcggacatcaacagcagaattagataaaaaatctaagagcggttataccttcttgtatgaattggtcaaacaaaccagaaatccacagattttgagagatcagttattgaatatcttgttggctggtagagatacgactgctggtttgttgtctttcgctttctttgaattggctcgtcaaccacatatttgggcgaagttgaaggatgaaatctactctgcgtttgggtctggtgaaaactcgagaatagatgaaatcacttttgaatctttaaagaggtgtgagtacttgaaagccgttcttaacgaaactttgaggatgtatccatctgtccccaataatggtaggattgctgtaaggaatacaacgctaccaaggggcgggggaccaacaggcaccgaacctatgttggtaagaaagggtcagaaagttgtctatagtgtctatacgacccacagaagtaaaacacattacggtgaagatgccgaagtctttagacctgaaagatggtttgagccctcgtccagaaagctcggctgggcgtatcttcctttcaatggtggaccacgtatttgcttaggacaacagtttgcattaactgaagcatcttatgtagtaacgagattgattcaaatgttccctaatatcagctccgatccaacgatagaatatcctcccagaaaagcttcacaattgactatgtgtctccaagatgggcttcttatttccttgtattgagggaatctaatagttttttaagtataacaatttcgtatatataatcatgtagctcaatccaacccttgctcagtctttctttcattaagaaaccatcttgttaatttccctaagtttacgagcttttgtcagattatatttttgtactgctgactgttgtcatctgataagaatttctattgcaaagtagaaccctgtttgatctacttcggaaactttcaatgaaaatctttccacaacacagtctagctttattgcaataacgcgaaaaaaataaactgaccagtttgctgctataactgtaatagcggatcgtaagactatgaagcgaattcaaacctagaacatccgtttcttctgatttagatcaaaatattcttgtatctatggcttaactatgagtgcgaaatgttacatcgactacataatatatttgaaccaatgtggttgccattacaaagccccttgtgtgccttaactctgcaatcactccaaaactaggataaaaactggctcactttgaagcacagcaataaaattaattttgtgaatgctgaggttacggtattgaatagcacacacatcattgaaaattctggtacccgcagaagtacctgaaatgttccatccaatgaaacttaacttaatggagggaatcactactgttttccatgcttatgctggttcagatcagataccctactatgaaatccgctgattgatacctttggaaatcaactctgcacataacatcaattcctgcagcggttgcaaattaagtagctcttgttttccgaaatactgcatttaatggtccttaccttttgcaacctatccacacaaggtttcaaatggagatataaaaggacacataagttccagaattatatatatctgataacttactcaacacacatctctacgatatgtcctctactgataaagtgcaatcatccaacgctgttacctatttctctcctgagcaacctgttcctgctggaacatatttccaacaagagaaacagaaaaagcctcttctattttcacctttgaagatcagggaattgatcttacaaaatcgtttagttgtttccccaatgtgtcaatactctgctggtagagatggtcaggctacaccttaccatttagttcactatggccaatttcttcttagaggcccaggcttgacttttgttgaagatacctccgtcagtcccgaaggtcgcttgtctccagagaatttaggaatttggaatgaccaacaagcagaagctcttaaagacatagttgattttgcccatctgcaaaaacaacttattggaattcaacttgaccatggtggtagaaaagcaagctctcaacctaactacattcatttggaacagaatgcagaggaatcagtaggtggttggccaaatgaaattgttgctccctctccaattgttttccgtcccaacggaaatcttgttaagccgaatgaattgtcgaagtccgatatttcaagaatcgttaatgattttgggaatgctgcagaaagagcagtcaagattagtggctttgatgccatcgaaatccatggggctcacggctatcttatcaatcagttttacagcaagatttctaacaagagaaaggatgaatatggaggaagctttgaaaacagaattagatttcttctagaagtagtcgatgaagttagatcgagaattcctagctctattccattgttcttgagaatttctgctattgaaaataccgaagatgaagacgcctggactttactggaatcaataaagttgtcaacgattgttgtcgagcatggtgtcgatgtaattgatgtctcttcaggtggtaattgtcatagacaatacagtagaaaaagtttgagcaaaggacatgcccctatgcatattccattggcaaaggcgattaaggacgaacttggagaaaaggtgttggttgcttgtgttggtagtttgaattcagcaactctaattgaggatgaattaaagaaaggatcgtttgatattgctcttgtaggaaaagggtttttgaataaccctgccttggtttggaaattcgcagaagagttggaaattcgtgttcaccgtcctttgcagtatggatatccgttttttccaccaattcagcaaattttggaattaattgcaaaatcggaggaagctgaaacttagaatgatgtctattacatttccagtactgttactatgcgagtttgagttctatcgaggacggacaaactaggagagatatacaagataaaacttacaaaatatacattttattacgatacattcaatgtttggtgatttattattcgtttacatcgtgattttatctacaactggggtttatgtataattgaagatcctgtattaggatccaggaaaccggaatccaatgaaagtttgcgttaaatggtgaattgtaaacgcagatgatattaaaagtttcttaccttggttgtgtagttgctattgaaaatgttaattctaggtgaattatatagacaattttagaaataagtattaaactggataaaatattaatactccaaaccaaaccaaaaatattttagtaagaaatttagtataggtctaattttgttcgtgtccttcttatatcatgaaattgaaataataggcagcatcaaaatcgttctattaataaattcctcttgtcgtcacttccgaaaggagaggagggaaaaatgaattgaaattattacatcgtgccaattcatgaaaggcattcagatacccgttcaatcagtaaggaattgatcaacatttcatttcatgtacaaaacgatcaaggcccaattgtgcttcatcgtttttgttacatatattccttacaaagcagtgtaccttcttcgcaatgtacgagagagcaaatgcgcttcaatttgtaacaggatcatataattgagtttcgaatatatgcacaggaatcttggtcagattcacaaggcaaatctcaagaagaatttaccatatacctatgagaatagctttttggtctcattcatatacggttaaaaaagtacctagtaagacaatcaaactctacttgaaatcgtggaaaagaaattgtttccaattggtagctcccaaacatgacaagtgatttcaatctggagtcgtatcatctcaagtaaagagaaagaaagactaaagaggccaactcagattacatctgtcagctctaactttaactccgatatctcctttatatctcctttatgaaggacacattatgaaagtacgattttcatgcgcggatcctgtaccgagttttggcgtcgaatttatcttagctactgtggcccaatctgctaataaagttggttccttggaaaaaatgtgtggagactcactataaatgcgagatatttgcagtcaaataaattacttttgaaatttcttccagcttgattgatttctactacagtgtgtatgcgaattagttgatttgtctagaagcatttataaatattttctactactttcgaagtatttatcacgaattgtttttaagaaacaacgtttgctaaaaatgactgctacctctttgaagtccaccaacctttttaagccaattaaggtcggctctgtcaccttgcaaaacagagtcacccatttgcctactacaagaaccagagcctttggtgatcacactgccacggacttgcaacttatttactacgaagacagatcttcatcgcctggcactcttttggtcacggaagccacacttatctctatgaaccaaggtctttatcccaatgttccaggaatttggaacaaggaccaagtcaagtcgtggaagaagatcaccgatgctgtccacaagaagagaggtttcatttctgtacagttgtgggctgttggtcgtgttggttttcctgatttattgaaggctgaaggtttaccattgacttctccttctgccttgtatgaatcagaaaagtctaaggaagcggctgaagctgttgaaaaccctgtcaggatgttgaccgaggacgagatcaaggatattatctacaaccagtataccaacgctgctaaaaatgccattgaagccggatttgatttcctcgaaatccacgctgccaacggtttcttagtggaacagttcattaacccaagttccaacacaagaaccgacaagtacggaggctccattgaaaatagagccagatttgccttggaattggttgaccacttgatctctgtggttggtgctgacaagttggctattaggatttctcctttcaacaatttcaaaggtatgttggctgagaacgaagtaattcaccctattgctacctttggttatattgtttctgaattacagagaagagccgataaaggtaatgagttggcctatatcagcgttgtcgatggtcgttacaactcagatggaaccgaagctgtccttaacactaaattcattgaccagatctggaagggtgtcattttgagaggggcaaagtatactcatgactacaaaaagaactgggagactgtcgctagggatgtagaccatgacaatcgtaccttgattggtttcggaagaaactttattgctaaccctgacttggtttccagattggaaaatggccttgaattgaatgcttatgacagagcgaccttctataagaattacaataacggttataacacttaccaattctttggatcctctgaagaggtggatgcagaagctgaagccaaagttctacctaagtcgttagtccaagattcttaaaggaaagaaccatagtttttttttattttattctatagatgctaacttttcaagaaacaaatatcaccgtaatcatggagttatggaatacatacgaaaactagattctagtattatagacaggcgaactacacaatatggatctgtagctatggcagcttaaatatgggttaactatatgtgccaaatgtcacattgaaagagagaaccgagagaccattttaaatgaatatatggatatatggatatataatgcatcaagagttttttttttttgtacgattcgaagatcatgaatctttacttaattgagtgaaggtacttgaatggttctactttttaggcaggcggaacatttttgcagcaattgatattttatataaattttcgcattttttttagacaacttgtacacaataattgggagagttattaaagtaaaggaaaagttatgaatattagaatatggtacagtctaaaggatgacttattctcagtatactagaaaggaatagcaatcatgggaaatggaaaattagaagtgataataaaatacaaatttccattatatttgagaataaattatcgtcagttaggctaggcatggacaaggatatcctactggtgttgtatatatatctcaccaggtttttctttctaaaataactcaaagaaaatgacacatgtatctttacattacctatgatacgaaaatctctttttggatggagagtggatattgattttgggtttttaaaatagtaaaatacgatataaatcaaaactatgctataatgatttttttttgaattttgctctaatttataatttaatttacttcctttcgcttccattacttttgagggtggtatttcgtcttaatagtaatgacacattataatctataaaagctaatgaatgactaactcaattattcgttgagatgtagatagtgctcaagattaaattttacaaattacactactctgtaaatttgcggtacacccatctatcaatagaacttgaaaatacagagatgtggtggagttattccttaatctctaggtatttcaaccacttatccgccctatctcaccaaaaaaatactaatctcaaggtgtatcctgcaggaaagtatgcactgcgaaagaaagtacttcacttcccccatactcttgattttagatttcttttaagttttgtatctttcttttcttacacgagtaaacttcccagaatgactactgtggttaaagaatccacaccaaagagagggcgtaccaatttggcttgcgacaggtgtcgccaaaggaaaacacgttgcgacggagtgcaaccggtttgtggaacatgtatgaagcgcaaaattccatgtaaatttgagcgtaaataccctcgagctcaggtttctgttcagtatgtcaagacactcgaagagaagttgaaaatcctaaaatctcaaggcagagacaaatttaacgataacgtcaatttgaatgttaataacaacggctcgacagcaaatccaatagaaggtctcggaattgattcctcttctagtggtgaacttcttcacagccaaaatcaaaatcagattaaccaacaaaatcaaatacattaccacactcagtattcaatacaacaactacctaactcaatcaataaccgcattacgcctcaacctatccgtaactcggggttctccgccatgtccgtgggctccctgaatgatatccatgctccttcatttgcctacatcaactccaataacaaaaaatcgttgatgttgaactacgacgataagcattctgtggaatatggtgtaaatggcctggtcatttcgggaacgtataaggatgaagagaccagtgcagatgccatgggagctggctctctttctgatgacaggagcaaagacaagaacttctacggatcttcagcagcagtttcgttcatgaaagaacttgctttaactgtagatggaggtccccaaaggtcggactcggaaaacaagaaatttgtggaacgagccaagtacaagatgtctcgtaacgatgctagaagcaccaaagggttatcagatatgttggttcctccacggagtatcgctgatcgttacataagaaactacttcgacttcacctacaatctctacccgtttgtacacaagccaacatttatggcagcctatgacgaaatctggtctgctgatgctggttcctatgaggtggatgagcttttctactctattcttaatatcatttttgcatttggttgtcgactcctgttagacattgaccatcaggaaagctttgccaatgctgacatgtactttgagcgatcgcaggagttgctccggtttcatctcatggatgccgggtcactcttgttggtacaagcgttgatacttacgggccagtatttacaagctacaaccagactggctgggtgttggaacatcataggattggccatccgaatggcgcagggtttggggttacacgaggaacagaatcttgagtctactaacagttacattgaaaaagagatgagagagagattatggcatggttgtttaatgatggataggatagtatcaatgactttaggaagacccatgatggtaatgcatgagtcccgtatgtctttaccttcagcgattgatgatgagaatatcttagacgattcctacgtaccctcttctaatccatcttacatgtgtttttttaatgaaacggttaagctctacgacatacttgcagacattttgaagattttctattctagcagtgaacctgaattttttgatctctttctcagtatttttaaaatcgaagagagactccataaattccatgaaaatgtacctaagcatattaagttcgggtttgagttgcacgaaaagcctttccgtcgtcagagtatcattctccacttgcggtacttgcatttgaagatggtactatatcgccgtgtattatttcctaaaaaatatgctgcaaacaggcgggaaattcactccgaattaatttcccataccacaaattcgatctccttgctttgtgtggaagctgcgatcgagttgattcaggtggttaagaaatatagagcggaggacatagagatattgccagctagttggtacactgtgttctacttgtacagtgcggagactgttatgttggcagctaaacttaagcccaccctacaagaagaaaccagcacggaagtctttaccactgcatggaccaacgggttagaaatgttggccggctaccaagatgaatcagagtcggcagtgcggtgtttgaagatattggagatcatgggagaaagagttcacgcttccgccttccgacacaagcggcatattgacattcctacggtcggcagcgactcggcccaaaacagtccttcgcatattccttccgatattctctattcattattgtatgatacagcagggccatttggaggtcctttcttctaccgagaagaaatgaatcggttttccagctagaattggattttatcggccgaactaatttcagcttcgaatgtgtagttcaatattattcgctagaggggttcaataaaagaaccgaataaattaccgctggctagttgaaacgactcctgtattactgtcactttttcatggcgatatgacaaagctatccggtacattacattttgctgaattatgttcttgttaccagatagcagattgtagtgcggacctttctatattttgtgtaagagaggggtcaagatcttgtaccgcatattttgtatgcacgtaaaaatcggaccccaccaatacacatattttttgactatcgattattttttatcttgctgttgcctctacactaatttactagatttggtcgtggaatccgttaagcaattttcttgtaatacaaaaccagtcacattgaaatgatacaggtacagatatcatttctagaattccacattcacagaagtttgatagccaaagctcaaaaggcccaatgaataacctcctttagcagcaaaatgttctatgggtacaaatttattatgtcaagactatttggccattattcccgggattccaaaacttcttctctaaaaattcctatctgtttccgggccttcttcaatcattattgacatttcttcacatgtttgtacgatggcattattttctctagttccatgtaatgcgttctataaacttattctgattatttattcgaacaccattttattagaaagtgtgccgatttgatcaatagctacctcaacaacgtctccgttttgaagatacacaggggttggcttcatacctaacgcaacaccacttggagttccggtcatgatgacagttcccatttccaatgtagtgctttgcgaaatgaaggaaatgattcttggaactccaaacaaaagatcgtcagtgttggcatcttgacgtatttcgccgttaacggtagtttgtaggctaaggtttcctggattttgaatcacttgtggtgaaaccaaggctggacccaatggagcgtacttgtcgaaactcttagagaaacaccattgaggaacacttccggcgaattctgggtccttctgccagttacgggaagacacatcgttgccagtaacataaccagcaacataactcaatgcttcttcttccttgatattttttccggtcttgccaataacaatacacaattcaccttcataatcacatttggattgagcgatcttaggaattggaatgtcttctccgaagtctgcaacactgaaacttgtcttgtagaaaatggatgggaatggtggtggggttctgccaccttcctggatgtgtttcatgaagttcaaacctacacacttcaccatgggaacatcatcgggagtaagaggacccaacaaagtctttacttccttgataacatcagtcacaacagcattatcaaagatatcaccagtgataaccttggccatgatctgtttaccttgcaagaattgcttgccaacatcgtagtcagcatcagagacaataggttcacctctataggtctttccgtcttgagcgacgaatctaattaatctcttccaagtaggggtcattattcgttttgttattgaaatagttattgtcgcgaactctaaatctcgtacgaaatcaggatttagcctggtatatatttcattcatgtagaccagttcctgaataaacttcggaacaacattcctattatttatatttactccgctcaaatttctttgattgctgattagccctaaaagctccgagctccgatcaaggaagtatcggcacggaattcatcccgaatcccgaaactaactctacaatctatccccacttatttgcatccgacttatcggaacaaggctccgtcttgcacccactatttgcaaaacttatataaatcgtcacacatggccagcttctctatccccgatttggatgatattcaacaccgacaaaccaaactatactcgcaatgactccagctgctacaccacgctctcaagaagcgcaggaaaatgatgctttgttaaaaagcatgcccgctgaaaacgtcgctccattatggaagatattgaagaagttgtctcctcccaagccaaacccaatttcagttcctcatctctggaactacaagaaattaaagccaatcttagatgaatctggacgtcttgttccaacagaacttgctgagagaagagtgcttatgttggttaatccaaagttaaatggtccccgaactactgaaactttgtatgctggtcttcaatatattagacctggtgaagttgctgctgcccatagacacgttgcttttgctcttagattcatccttgaaggacaaggaggtttcactaatgtcgagggaactagaatgtcaatgcaaagaggtgacgtacttttaaccccaagaaactgctggcacgatcatggtaaggatggaaatggtcctatgatctggttagatggtttggacttgccaatgtggcaatcaattcccgtgaactacactgattactatgaagaagacagattcccagctgttgataatgaaaacactccaatgaagttcccatggcaaccagtccaagacaagcttgacagtattaagggtgactttgctattttcgaatatcgtgaccaggaaaatcctgaaaagtacgtatcctctatacttggcgctgaagccttgagagtttctccaagtgcttctactcctgtccgtcaagaaaacagttctttcgttttctgtgtctacgaaggtaagggccatactattgtctacggtgacgacggtgaagagaatgttttcaactgggaaaacagtgatgtcttctgtattccttgtaacatgccattcaagcactttaatgacagtgaagaacaagcttatctcttcaacttctcggacaccccattgctcaaaaacttgagaattcacagttccgacttgaagaagcataactaggtgtttttgtgtaagtaggtgttatatgttctgcaaattaattagtgttaatccatgtctagattgaaaggaagagttctatgatcagtaagagcaggccatgtctataggtctgtgtcatggtcatgtgcactgggctaacatctagtgttagatgtcatccaccctaagtttctttttctgccttattctttatctatgcttgaagttacaaggaaaataatgccaaatttggaatcttgcagcaatccattatgcagtatacaaaattcatttcaattttgttttatttctaatacaaaatcctataagtaacctcacattagcttacttgaagaacagccgcctatacataaattatgactaataaataaactaatcaataaaagcgttccatccaaagagccagcgttggtattcaatatcagaccattgatctgggttattatcatctctcttcatcattttagtatctctttcttcttgctcttcaccatctggtaagtgccagacgtgaccatttttgtgagcacctgcttgaacagcctcaactcttctctttcttctcttttggtagtttttaagagcagctgggatgtcgctgctggacttgcacatgttgatttcgtctgccaaggtagcgccgtcttcaatagcttgagcagccccttgagccaaatatggcaacatagcatgagctgcatctccaatcaaaacgactttgccgctctcactgacataacgtggaagcataggcaaatcggcaagaacccacttgagaacagattgaacctttgataaaagtctaacaacaatgggatcgaagtttctgtagtggtgtctcatttcttctacatcgccaggttcattccagacaccaacagaggcttcaccaggatgacacaacaccatattgtatagctctccatttcttattgggtatgccataatgtgtcgtctgtaacctatccagcagttggagttgacatcagtcataagatgagcaatttctgggtcagacaacattacttcccttggaatagtagctctgtaggcacagtttgaacatttaagtggtagtactttttcttcggtaactactgcactatctctaaccttcgaacgaataccatcagctccaacaatgatgtcagcttggtggatattaccatcaaccatagtaacagtaactgcttcttggtcaacggaagctattctagagttgagtttgtattcaactccaagttctagtgcagattcgtgcaagattctttggtaatcagcacgatgaatcaaaacgtatgggttaccataggactttgtcatctctggatccaatggagtcatggagagaaccttaccattgtcatatcttctgagacaaatgttttttggcctggtaatgtaaggcaagaatttgtcgaagataccatactccttaaggacatgaacggagttgggaggcatttggataccagcaccaacttcacttaaagatgatgaaccttctaaaatagtaacattgtgacctttcttcctcaagccgatggaagcagcaatgcctccaataccaccaccgcagataataatgttgaaatgagttgcagtcatttttgttgagtgtttcagatgaaatagttgatgtctctaacttcattcaggcaagtcaacgagagccgaagggggccttatatattcaacatatcctatttggaggattcggcttttcttgctgttaccccatgtctaccctattttttggttgttctatcggcttcgtatgcgctctaactaacatgttgttcggggctacactccgcgcttgcgtactacataaagcatttttggggaaacttggtcttgaaaaataaatcggatcttgcttcctaaaaagtggagaattagatccaaaccatggcggggtacataaaattctcatatattcctccatagaaaataccgaggagaggttaaagtagtctccacagtgtttattcaattatatattcaaacatttgtattcgctgaaatttattttttagagcctacatttggaacaaaaatggggtggggtatcctaaacagtgtatctggaaaataatctaaagttccatttaccccaagtcagttgcaacatacaaatctagatttttttttgtataaatgtttgttatcattctcatttagcgataacttctggtctaaaaattaccattccatacaataaatatacataatgtctttggttagcgatattgaaaagcactctcagaaccatatcgaaactgttctggatgaaaatttgtcagaactttctcgtgaacatattgattatcttatgcaaagacatgggacagttgacttagatcctctaccttctatggacccagaagatccactcaactggcccacttggagaaagaactacgaaattttgattatcgccttccaatgttttttgggtaattatttttctgcgtctcttactcccgcttatgaagatatggctgtacagtatggtgttgatgttccaacatcttcttacttaacttctgctcaaattgctgttgttggtgttttgccatttttttgggttcctattatgaatacttacggaagaaggtccattctcatgtatactgctttttgtgctattggcataaatattgctggtgcttatgtcaaaacctacggtcaacaaatggctacaagatgtttgtatgctttttgtgctgctacagcatctgctttgggtagcgcagtggtttctgacttgtcttttagtcacgaaagaggtatgaaaaatggttggtggtctcttggttttgttcttggtactccatctggtccctttatctccggtttcataatgcaatactctactaagaaatggatcttcttcatgttcgctatattcaacgcaattcaagttgtgttgtttttcttctcaaaggaaacggtctacaacagaggcgataaattagaagaaccaagcggtataatcaaattgattgggatttacagacgtaataacaataaggtcactttaggatcttttattctgccattaaagcagggcttaaactggagaataggtactattgttattgctctcagtgttacttttgcgtacgccaatattgttctcatcgttgaaatgccacaaacttttggtactatattcgaactcagtccgcaagcactaggtttacactacattgctcttattcttggttccgtcataggtgaagcgcttgctggttctctttccgattggtggatggctaaaagtatcaaaagacgaggaggaaagagaatcattgctgaccgtttgtatgtctcttacaatggattcttgttggtcatcattggtttggttgtctggggtgtttatttggacagagctaggcctgatcactggagtattagtgcattgattggagcagccattatggcagttggaaacaacattgttgcaacagtcttaattacttattcgattgattgtaatcctgcatatgcttctgatattggtttatttattaccattgtaagacaagtctatggttttgttgctccattctactttccaagcatgtttaccaatttgggcttcattggttccgctggtttgatgattggccttgtattcgtcttcggtacgattgttacctcgttcgtccacttcatgagtagaaaggtttagaacaaatagttctcggctatgtttaataaattgaactacaaacaggcttacaaaatatgttttcaattgtgcctgtagatgtagtgcttgcaacttttatttagtggttgctgcgagtaacttttggatcgacaggctgcaaagtcaatctaagtagatcttatttgagaagtatacattgacagatttccttcaaggaatttatcaaattatctaaattggacagtgaaggaaactgtgaaattggttcgccacgtactgcaatcttcttattttgaaagtagtttagtcaaaatcaaattgacaaacacaggggtcaaccaagacgaacttatagttgaatgtggattatttcaatactttttattgtttaatattattccttacccagaaattgaacaccgacttccaaatgaaacttggtcagattggtattgctgggtaacagctctcacgtaattttcacattcctattttggttgagaaatacaaggaattgttgcgaaaagactgcagatactcaatttcaaatactgataacgaactcaattaaaaaaaaagagagtatgtaatcactattttgtagtttctgatcacgtgcctttggacctttatccaaatgaatactttcgaaaacggttgtggtattggttcagattagtttagtagttacttgcaaaacgattaaagtcagattttccgttccaccatgagtgtgattaccgcagtagtgtgaaaagtccttactgtataagccgattgcaaaagtgtcgtgaggtatattgatatgcgacattttcacaacatgtccttcataactccgactattatgccacactcatcggcggttacactgtagagagctttctctaatactagcctgtgagaagagatgaccaacatgtgtttggttctactattgttaaactattcctttaaatgatatttcgtaaaactcagtagataaaatcaagttagacataactaaagggaaggccaactccaggaaataatggaaattggtccatttagacctttccttcctgaatgatacctttggcagcttcggccaaagactcttcaaatggaattggagtccagttgaagattctctttgccttttcgatgctgaggatcttacgaacttcactaggtccggtttctctggttggtaaatttatatggtacttttctggaagtgtagttctcaagacgttggcaacatcaacccacgtaatggtagggcctgaggctaccaagattctttgtccagatgcttttttattggtcaaagctttaatgtgcaacttggcagcatctctgatgtccacaagatgaacagtttcaggtctaactccatccttgtttgtaccgtcgaacatactcttgatgatgttcaatgaagttgagttggtaacttgcttcttcaaggaaggtccaatcatcaagactgggttaatagtagtgtagccaaatttgacgggggtggatttaatatactcccaagcagccctttcagccaaagtcttggaaagtgggtatgcatccactttttctgtgtcagtccagtcctcttcggtaaacactggtttctcgtgaccaaatccaattgcaacaaaagatgatgtggcgaccatgtgcttgacagtgttcgttttcgaagcaaagcggatgatacgtaaagtaccttctcttgctggaataatcaagtcatttggatctttgggaggaactagagggaaaggagaagctaagtgaagaacatagttgacatcttgaaagatttcggtccagtggtcatccgaagtcacatcggcttggtaaaccttcaaatttgcatcgacaatctccttagtaagattgtcgcttgaggagtacaacgattctctcaattgagcttcttcttcagggaagagaagagtggtcttgatctttgctccttgttcaagcaagttgagaaggacgaaaccagcaagataaccagatccaccagtaactaagtagacatcagacatgatcatagattttgtataatttcaaagacgaaaaaggttgttctagaaagatcactaaaatcttgcaattttaaagtacaagaacagttagtgaaatattcgatagataacaaatgaacattccaaattacaattggatatggtgacatatttatattgccgcttgactaaaccggtagtatagcaatcaaaaagtaacctttgcccattgtgtggcaataattgtagttagattgtggagatctggggatgaaaccactggtgattactagtagccggtgtatgtaagttagcgtcagaatgcagcctccaaaacaagaaatgctatctattaccttcatgtctcttccgacttggttgtggtgcggtagtgaaaagtggagttgatcggtaaaattttgcccacttaagccttagtgggggtggcggaatgaatataatgcccctctttttaattttaatctggtatcgtaaattgatttacccgataaaagctttcccgaatattatttaagactgtgtagtattcccgcactaagcattcgatggagcaaatagcttccgtgttacattggatttatttgcaatgtcggctcacttaccccaatggaaactagaaacgagctggttttcactcctttggtagatttctggatgctcctcatttgaggaggggccagggtctctgaatgtcgcaagagatttagtgaatagcaaaatgttggtcctcgattttggagtgatggtggttccggagaagaaggagtaggatagaagtaccttgctattactagctctacagtttgtggggtatgtacgaaccggatgatgtacattatatggggtaaggagaaaagtgtcagctcaaaaagtttatctttttcaatcattagaatcaatttcgcaatgtgttcatgcggtgaacatatactcaaatgaatatctattttaactacaagagtaaacaacagcgtttacttttcctttgaaagttccttcttcactgagcaacatcttatccgatatttggttgaacaaagactaaatagtaatatacaattgcaatgggaaccatgagggtgccctaaataatgtgtgtaggtctatttgtagagctaaggtgtcttccttaaaaaggaatatatttcgttattacgaacaagggtttgctcttcgaaataggagatattgatggagctaaattgggacttcattttaagctcaagaatcaagactaccaaatcaccacattaaaagtgtcttcctttctcatggactcttcgtgcagaagttaatatgaagtcgacgtgaacttttttctaacaaacacctagccgctacttgagattgcctagcaatctgcttgtggatactttatcaatgtaaggactatgtctgtctatggcagatgggtgatgtacatttggtataattaccctcaagatgacataaattgaaaaagcaaccctttgatactagattaaatctatttggtttgaatatcatacagtaattaaattacagacaagcatataaaaatggttgcgaaaagaaaacttcaaattttcgatgcaaaaggacgttctaaaataaagcacgaatgcgatatctattccaacaaatacaaacttccttgctagtttgacatcatagaaatgttaatttatgattctagaagtctgggataacttcattgctaagctcgttactaaaatcttgtaaaagtttactgaaactcactattacaaaaagagcgacccacgtcacggagtagagtttgccatggtcaacaatcacctttggcaagttaacactggttatccttgataataaaatattttagatctgactacattgggatagtggtttttggtatttccttcggcatagcacacaaagacctccccactttaaactgaaattcgcattttcggagttaatttgctatgcatacggattaactaaccgatagaccggaattgcggtccggtaattttacatttttggttcattctccccacactcttaaaaaacttttaccccagagccagtacgggaggagaattttcgttagtgaaacttacaaatgaaatactgatcatgatataaagtcaaggcatatacatatcttcttcgacttattggtgaaatctttttcagacttggtaggattcaataaatatagcacaacttcaccctgaaatctaagcagctctgaagcaggacatcatcattggatatataaaagctggtttctagcatttacatctttacatttccattatttcgctactttctgtttccaaaagtacaatattcctaaaaatggcaactgcttcaacaactttctcgagcattatcgaaggtaaggttttctacactgaaggaaaacatcctgtctactcacacgataaccatgaggaaataattcaccacttttcttacttgactgacatcaagaagtcagtcccccaaattgcagctgcagctgagcaaggttttgaggaatggtcatccttcgcatatgcagaaaaagtgaagatttttgacaaagctgctatcttgcttactgaaaggagagacgaattgatcgcctcgcacaagaacatcggaggtcctacatggttctctcacgtcaacgcagatgagtccgtctcacaattgaaggaatacactggacttctctcaagacctacgggtgttgtagctcagtctattcacactgaccttgcacttactgtaagacaaccaattggcccagttcttgctatttctccttggaatgcacctgttgtattagcaagtagagccatcttggctccattggctgctggttgttctgttatcttgaaggcttccgagaaggctccagaatctgcctacctcatagtcagaaccttcattgatgcaggagtaccacctaaggcattgcaattagtatttatcaagcccgaggacaacgctaccttcattagctcgattttgcacactggttcaatcagaaagatcaacttcactggatcaactctcgttgggaagaaaattgcagaagttgccagtaagtacttagtgccatatcttatggaattaggagggaagaacgtctctattgttgaaaaggatgctgacttaaccaaggcagctggtagtattatctggagctcgtggtcccacaaaggtcaaatatgtatgagcacagacaaggtttttgttgaagattctatatacgaccactttattgcccaattaaaagagctggctgcggatatcgtgaaagaccctgactaccaaatatctcaaagagatattacattcaaaagaaagcttgttgagttggtaaaggatgccctagacaagggtgctaacttggtgtttggtgaactcaattctgatgtcaacagcagctcattcagtccattgatattagagaatgtcacttcagacatgttgcttgattccactgaatccttcggacctttgttttctgtgcataagtatgccaatacgaacaaactagtcaaggaattaaacagagttgactatgggttgaaggcttctatttggtcccataatgttttggaagccttagaaaccgcaaagaagatccatgtcggtggtgtacatatcaatagtccaactatccatgatgaaccaactcttccacacggtggtgttaaatcaagtggaactggaagattcaactcgacatggggaattgatgacttttctatcacaaaaactattaccctaagccagtgatagatagtttacaccaccgcccaaacagtaactcgaactaatgatggtctttcgacaattctcactgctatcaccatttcacatgcctctccagctacaccatcccctctgacccagtctatgagggttctgctaccttcatgagagtcacattctctgttgccactctttcatgtttggctgtgacattcattgtttagagaataattctcagtactatcatttttatttccacctcaatacctttttttggttcattcaaatcttactattttggaaattctttccacctctatctatatagtaccacagttaactaagagcatatcaaactaaccactacataaaacagcatttagatagtaaggtactcaactatgggattaactaagggttcggactttcaaatttttattctcacctgttgtatcctgtgaccaaggaccatgtaaccatattttaatggtaataattagagcattaggattttgtaaaatttaaaggtgatgaatccttacttcattgaataaaggctttcgaatggtactactttcagggcaggtagaatttttttgcagcagttaagatttttatagtatttttcgcattctttctagacaagcagtacatattcaggaattaagaaaagttataaaagcaatggataatttaagattgtgagaatatggatatttggtgttggttactgttgataggatgatgtatgatttagtgggaatgtgatattgttgtattatattgagttgttgtgaatttggagggaggattatccatttagaatcacatgactagaattgatttgacagagagttatgtgcagtcactatagacgtggatacaaatataggcgcatttgatgtgcgtgtatcaccaaaatgagatctgagaggtataaaagagaggcgagatccccaaagtttgaaaaaattattaaagtttataattaaacaaagtatggttcatttgaagggggatattcttgatttttagggaataacataatataagaagatataaggtatgaacaattcgtactcctcaatagctggacattcctagggtctatgttatctcattttcataagtattgcggtcttctgagcgaggaaggaatgtgagctacgacattcttcgcagcagacctgtaccgattcgcggaaaaagcgtctttcacgtgacctgacaagattcgtatctattgctgcagcggagatatggttagatcagttcgaccaacagtcctgtatggaacagacccaaatagggcatctgtaacgtgaccaaagatatgtgatattagtttgttgcacaggcaggacataacgtgaccactgatgcgagataatggttgaggcacggaagttaagtgaggcgacccaaataggatataacgtgaccaaagggatgtgagataatagttgcggcacggatgtataatagcggcacgggccttgcggtatggatcttttcacgtcttgcggtatggatcttttcacgtcttgcggtatggatcttttcacgtcttgcggtatggatcttttcacgtcttgcggtatggatcttttcacgtcttgcggtatggatcttttcacgtcttgcggtatggatcttttcacgtcttgcggtatggatcttttcacgtcttgcggtatggatcttttcacgtcttgcggtatggatcttttcacgtcttgcggtatggatcttttcacgtcttgcggtatggatcttttcacgtcttgcggtatggatcttt

SEQ ID NO: 109 - DNA, 1266 bp, Saccharomyces castellii
cctcattacgctgaaagaatcttattgtctttgagagaaattattcgtgaagatgatcaattttcaagagttactttgttagaatatttgaaacaattacatcctgtcgaatgggattgttttgttaaggatactaagatcttagctgaagaaactgccgcctacgaagggaatgaagacgatggtgaaaaggatggtggtttgaaagctcaaattgatgatctacctttctactgtattggtttcaagtctgctgccccagaatatactttacgtacccgtatttgggcttctttgagattccaaacactttaccgtactgtttctggtttcatgaactactctagagctattaaattgttataccgtgttgaaaatccagaaattgttcaaatgtttggtggtaatgccgaaggtttagaaaaggaattagaaaaaatggctagaagaaagtttaaattcttggtttccatgcaaagattggctaagttcaagcctcatgaattggaaaatgctgaattcttactaagagcttatcctgatttacaaattgcttacttggatgaagaacctccattaaatgaaggtgaagaaccaagaatttattccgctttaatcgatggtcattgtgaaattctagaaaatggtcgtagacgtcctaaatttagagttcaattatctggtaatccaattttaggtgatggtaaatctgataatcaaaatcatgctttaattttttacagaggtgaatatatccaattgattgatgccaatcaagataactacttagaagaatgtttgaagattagatctgttttggctgaatttgaagaattgaatgttgaacaagttaatccatacgctccagatttgaaatacgaagaacaagtcacaaatcacccagttgccattgttggtgcaagagaatatattttctcagaaaattctggtgtccttggtgatgttgctgcaggtaaagaacaaacttttggtacgttatttgctcgtactttgtctcaaattggtggtaaattacattatggtcatccggattttatcaatgcaacttacatgactactagaggtggtgtttccaaggctcaaaagggtttacatttgaatgaagatatttacgctggtatgaacgcgttattacgtggtggtcgtataaagcattgtgaatattaccaatgtggtaagggtagagatttaggttttggtaccattttgaatttcacaacaaagattggtgccggaatgggtgaa

SEQ ID NO: 110 - DNA, 7655 bp, Saccharomyces cerevisiae
gcatgcaaacatctacacaattagcaagggcaatccatattttgtcttttcgcgccctggaaaggcctaagtaatgtcgtaaacgcattctatctgtacttcaactctcctctgtgcattggtttgtgcaaatcacattttacgatactgccagatttatgcaaaaagagaaaaccaagggaccagaacaaagcaaaattacgataaacttcgaattccttcgtgcttgactaagacaaagggatggacgtagcgatttttagcgggccaagaactggttccgaaaaagcacaggtacaccgaaccctcagctaaggagggacagcaccgatgcggaaggacaaactttctttttgcctatcacagtatcttatcgagctaactattttcgacacacatgaaaaagcagaaatattaacgaaaaagaaaagaaagaccatgtcatgtacgggcaatcagaatctgtaacaagcgccatttttttttctgtatcgggccctccttactgctctccttccgtgtaacgcgttatgaaactctaatcctactatcggcgactctctcgaaatttttcttaacgcgtccttgtactgcgtctaacgcttttgccacttggatttctattataggaaatagtctcacttactgggcgacgaattttcgcgttttgatgaagcacaggaagaatttcttttttttttggcttcttctggttccgttttttacgcgcacaaatctaaaaaaagaaataattataacctagtctcgaaaattttcatcgatccattcgttcctttttttcgattttttcagatcaaaattcttgtttctttctttgtcttagtttatattaaaagatattttgattttactcctgaactatttattctttctaagaaggccagaacactacagctgttttaaccgactacgaagttctccattctcgaacactagccttcatttaccaaacaggaactagcgtatatcattagtccttattcgaaaagagattggtagatatttattgtagtttgtgagaaggagaaaatactgtcattggactgatagttagaggacattaacctctcttacgttcgctcaaaaaaattaaaataagcaagtagctgaaatcaagtctttcatacaacggtcagaccatgaacactgatcaacaaccttatcagggccaaacggactatacccagggaccaggtaacgggcaaagtcaggaacaagactatgaccaatatggccagcctttgtatccttcacaagctgatggttactacgatccaaatgtcgctgctggtactgaagctgatatgtatggtcaacaaccaccaaacgagtcttacgaccaagactacacaaacggtgaatactatggtcaaccgccaaatatggctgctcaagacggtgaaaacttctcggattttagcagttacggccctcctggaacacctggatatgatagctatggtggtcagtataccgcttctcaaatgagttatggagaaccaaattcgtcgggtacctcgactccaatttacggtaattatgacccaaatgctatcgctatggctttgccaaatgaaccttatcccgcttggactgctgactctcaatctcccgtttcgatcgagcaaatcgaagatatctttattgatttgaccaacagactcgggttccaaagagactccatgagaaatatgtttgatcattttatggttctcttggactctaggtcctcgagaatgtctcctgatcaagctttactatctttacatgccgactacattggtggcgatactgctaactataaaaaatggtattttgctgctcagttagatatggatgatgaaattggttttagaaatatgagtcttggaaaactctcaaggaaggcaagaaaagctaagaagaaaaacaagaaagcaatggaagaggccaatcccgaagacactgaagaaactttaaacaaaattgaaggcgacaactccctagaggctgctgattttagatggaaggccaagatgaaccagttgtctcccctggaaagagttcgtcatatcgccttatatctgttatgttggggtgaagctaatcaagtcagattcactgctgaatgtttatgttttatctacaagtgtgctcttgactacttggattcccctctttgccaacaacgccaagaacctatgccagaaggtgatttcttgaatagagtcattacgccaatttatcatttcatcagaaatcaagtttatgaaattgttgatggtcgttttgtcaagcgtgaaagagatcataacaaaattgtcggttatgatgatttaaaccaattgttctggtatccagaaggtattgcaaagattgttcttgaagatggaacaaaattgatagaactcccattggaagaacgttatttaagattaggcgatgtcgtctgggatgatgtattcttcaaaacatataaagagacccgtacttggttacatttggtcaccaacttcaaccgtatttgggttatgcatatctccattttttggatgtactttgcatataattcaccaacattttacactcataactatcaacaattggtcgacaaccaacctttggctgcttacaagtgggcatcttgcgcattaggtggtactgtcgcaagtttgattcaaattgtcgctactttgtgtgaatggtcattcgttccaagaaaatgggctggtgctcaacatctatctcgtagattctggtttttatgcatcatctttggtattaatttgggtcctattatttttgtttttgcttacgacaaagatacagtctactccactgctgcacacgttgttgctgctgttatgttctttgttgcggttgctaccatcatattcttctccattatgccattgggggggttgtttacgtcatatatgaaaaaatctacaaggcgttatgttgcatctcaaacattcactgctgcatttgcccctctacatgggttagatagatggatgtcctatttagtttgggttactgtttttgctgccaaatattcagaatcgtactactttttagttttatctttgagagatccaattagaattttgtccaccactgcaatgaggtgtacaggtgaatactggtggggtgcggtactttgtaaagtgcaacccaagattgtcttaggtttggttatcgctaccgacttcattcttttcttcttggatacctacttatggtacattattgtgaataccattttctctgttgggaaatctttctatttaggtatttctatcttaacaccatggagaaatatcttcacaagattgccaaaaagaatatactccaagattttggctactactgatatggaaattaaatacaaaccaaaggttttgatttctcaagtatggaatgccatcattatttcaatgtacagagaacatctcttagccatcgaccatgtacaaaaattactatatcatcaagttccatctgaaatcgaaggtaaaagaactttgagagctcctaccttctttgtttctcaagatgacaataattttgagactgaatttttccctagggattcagaggctgagcgtcgtatttctttctttgctcaatctttgtctactccaattcccgaaccacttccagttgataacatgccaacgttcacagtattgactcctcactacgcggaaagaattctgctgtcattaagagaaattattcgtgaagatgaccaattttctagagttactcttttagaatatctaaaacaattacatcccgttgaatgggaatgttttgttaaggatactaagattttggctgaagaaaccgctgcctatgaaggaaatgaaaatgaagctgaaaaggaagatgctttgaaatctcaaatcgatgatttgccattttattgtattggttttaaatctgctgctccagaatatacacttcgtacgagaatttgggcttctttgaggtcgcagactctatatcgtaccatttcagggttcatgaattattcaagagctatcaaattactgtatcgtgtggaaaatcctgaaattgttcaaatgtttggtggtaatgctgaaggcttagaaagagagctagaaaagatggcaagaagaaagtttaaatttttggtctctatgcagagattggctaaattcaaaccacatgaactggaaaatgctgagtttttgttgagagcttacccagacttacaaattgcctacttggatgaagagccacctttgactgaaggtgaggagccaagaatctattccgctttgattgatggacattgtgaaattctagataatggtcgtagacgtcccaagtttagagttcaattatctggtaacccaattcttggtgacggtaaatctgataaccaaaaccatgctttgattttttacagaggtgaatacattcaattaattgatgccaaccaagataactacttggaagaatgtctgaagattagatctgtattggctgaatttgaggaattgaacgttgaacaagttaatccatatgctcccggtttaaggtatgaggagcaaacaactaatcatcctgttgctattgttggtgccagagaatacattttctctgaaaactctggtgtgctgggtgatgtggccgctggtaaagaacaaacttttggtacattatttgcgcgtactttatctcaaattggtggtaaattgcattatggtcatccggatttcattaatgctacgtttatgaccactagaggtggtgtttccaaagcacaaaagggtttgcatttaaacgaagatatttatgctggtatgaatgctatgcttcgtggtggtcgtatcaagcattgtgagtattatcaatgtggtaaaggtagagatttgggtttcggtacaattctaaatttcactactaagattggtgctggtatgggtgaacaaatgttatctcgtgaatattattatctgggtacccaattaccagtggaccgtttcctaacattctattatgcccatcctggtttccatttgaacaacttgttcattcaattatctttgcaaatgtttatgttgactttggtgaatttatcttccttggcccatgaatctattatgtgtatttacgataggaacaaaccaaaaacagatgttttggttccaattgggtgttacaacttccaacctgcggttgattgggtgagacgttatacattgtctattttcattgttttctggattgccttcgttcctattgttgttcaagaactaattgaacgtggtctatggaaagccacccaaagatttttctgccacctattatcattatcccctatgttcgaagtgtttgcgggccaaatctactcttctgcgttattaagtgatttagcaattggtggtgctcgttatatatccaccggtcgtggttttgcaacttctcgtataccattttcaattttgtattcaagatttgcaggatctgctatctacatgggtgcaagatcaatgttaatgttgctgttcggtactgtcgcacattggcaagctccactactgtggttttgggcctctctatcttcattaatttttgcgcctttcgttttcaatccacatcagtttgcttgggaagatttctttttggattacagggattatatcagatggttatcaagaggtaataatcaatatcatagaaactcgtggattggttacgtgaggatgtctagggcacgtattactgggtttaaacgtaaactggttggcgatgaatctgagaaagctgctggtgacgcaagcagggctcatagaaccaatttgatcatggctgaaatcataccctgtgcaatttatgcagctggttgttttattgccttcacgtttattaatgctcaaaccggtgtcaagactactgatgatgatagggtgaattctgttttacgtatcatcatttgtaccttggcgccaatcgccgttaacctcggtgttctattcttctgtatgggtatgtcatgctgctctggtcccttatttggtatgtgttgtaagaagacaggttctgtaatggctggaattgcccacggtgttgctgttattgtccacattgcctttttcattgtcatgtgggttttggagagcttcaactttgttagaatgttaatcggagtcgttacttgtatccaatgtcaaagactcatttttcattgcatgacagcgttaatgttgactcgtgaatttaaaaacgatcatgccaatacagccttctggactggtaagtggtatggtaaaggtatgggttacatggcttggacccagccaagtagagaattaaccgccaaggtaattgagctttcagaatttgcagctgattttgttctaggtcatgtgattttaatctgtcaactgccactcattataatcccaaaaatagataaattccactcgattatgctattctggctaaagccctctcgtcaaattcgtcccccaatttactctctgaagcaaactcgtttgcgtaagcgtatggtcaagaagtactgctctttgtactttttagtattggctatttttgcaggatgcattattggtcctgctgtagcctctgctaagatccacaaacacattggagattcattggatggcgttgttcacaatctattccaaccaataaatacaaccaataatgacactggttcccaaatgtcaacttatcaaagtcactactatactcatacgccatcattaaagacctggtcaactataaaataatacaatcaatacttgcttgaacgcttgattttactgatattctatccaaaagcaagtagaccagaaactctcaagatgttgcaaataccgttcgatgtttttggtttagattgttttaatgttgatgcttttttacttatttttggaagcgtctttttaatttagttttatattataggtatatgaatgtgtttatgccaataagggtttttttgtacagttatgtgattataaacagtcttttgtctagtttttttcaccagtatcggcctctatttataaaaaacggagcagctttcggtgtcagtaattctgaaaaaatttgtgtcactctgattgtaaatgaattaatttagctagatagttgcgagccccaacgagaagattgtcagacaaagacaacattcaacaacctacatccgttactattcgttaactcgaggtacttgaaacttttcagttaagtatgaacaagaaacaaaatttttacgcagccattattgtggctatttttctttgtttgcaattgtctcatggctcttcaggtgtcagctttgaaaaaacccctgctattaaaattgtaggaaacaaattctttgactctgagagtggggaacagttcttcatcaagggcattgcttaccaattgcagagaagtgaagaggagcttagcaatgcaaatggggcttttgagacaagttatattgatgccttagcggacccaaaaatatgcttaagagatattccatttttgaaaatgctaggagtgaacacactgcgtgtttatgcaatagatccgacaaaatcacatgatatatgtatggaagctctatctgccgaaggaatgtacgtcctattagatct

SEQ ID NO: 111 - DNA, 4328 bp, Saccharomyces kluyveri
tccaatttcagtggatgtacaaacgacttgcatgtgagcgatatcccatctaccgtggagcgtcaaaagtcgttgtatccatcatggaatgacgatgctccattgactgaaaatgagattcaatctattctaactggtttgcaaagagctttccagttccaaaaagacaacgtcagtaacatttacgactatcttatgtctatgttggactctagggcaagcaggatggggccaatggaggccttgaatagcttgtaccaggattacgttggtgttagaggctcgaactttatgaagtggtacgcctcttctaggatcgatgtgataggtggagctaaagacaaagagctatttggagatgcgaaacctggttgggccaaaagtactgctcctagtgatcttattttgcaagtgtcgttgtacttgttatgttggggagaagctaaccacgtcaggtttatgcctgagtgcttatgctttatttttaaagtttgctgtgactactactattactcatactgccatgatatgaaaaccggaagggtaccatgggctggtaaaaggcctttgccattccttgatcatgtgataacaccgctatacaactttcacaagtcccagcagtgtagtttgaatggtgacgttgccagtttaaaggatcactctaaagtcattggatacgatgatatcaaccagtttttttggcacagggaagacttggatagactaaagcttcaaaacaatacgttgttgaatacaatccccatagagcaacactacctgttcttgaatcaaatagattggtccagatgcttctacaagacatactatgagtccagaacctggttccacgttgttaccaacttcaaccgtatttggatcatccatctatctgtattttggtattacaccaccttcaacagcaagccaatatacacccaatattatgaccagaccatagacaatcaacctactattcaatgcactctctctgctttatccattgccggtgtcattgctactctggtaaacttatttgctacgattggtgagttgttgtttgtcccaagaaaatttcctggtgccctaactttaaccttgggaagaagaatcttcattttgatggggatattgtttttgaatcttagcccatcgatttacatctttggtgtacacccatggaatactgttaccaaaataggattgacccttgcagtttgtcaattcgtcttgtcacttgtaaccgttgcgtatttttcagtcgttccattgcaacacctctttaccatgtcaaatggtgaggagcagtcaccagagcaatcttttgtcaatttcattgtaccattacagagaagaaaccatttggcttcagtctttttttggacactggtttttgcctccaagtttgtggagtcttattttttcttaacactatcgctgaaggatcctataagagaattgagtagcatagcatcgaaacactgtgacatagacagctttgtaagtggcatggtatgccaattccagccaaaggtattgttggccatgatgatactaactgacgcggtgctattctttttggatacctatttgtggtatgtaatattcagcacttttttttctacggctagatctttctacctaggtatatccatttggaccccctggagaaacgttttcagtaagcttccaaagagaatcttctccaaaatcatattttcaaaccaatgccaccattattcgtgtggacaacaacaggtggcgaaggtatggaacgaaattatatggtcgatgtatcgcgaacacttgatttcggatgaacatgtacaaaaattggtatatcatcaaattgcaacaccggatcaaacaaatggatgcatggtcgaagagcccgcatttttgcacttccaagaagagcattttttcaagtcatcgttgttccattctcatcgatcagcaaagagacgaataacgttctttgcacgatccttggtgtgtcctatgccagaaacatcgtctgtcgagaatatgcctgttttcacggttttgataccgcactacaatgaaaaaattttgttaagtatcagagagattgtaaaagaggaagacgaatactcgcacgttactctattagagtatttgaaatctctataccgaaacgaatggatgtgttttgtcgctgaaactagaagattggcagaagaaagttttgaagaaaattcaaaggaagatcttgcatcgtccacttctccctctttgccaacaattgttggcgataagccgtcgacactttcctattcgtttgccggttttaaaactgccacctcggattttatcttgagaacgcgaatgtggacatctttgcgtacacaaacattgtttagaaccgtatcaggatttatgaactactcaaaggctattagcctattacatagtgtagaaaaaagccctaaacacactccagaatctgcagattttgtggcactgcataagtttagaatggttgtgtcgatgcaaaagatgaacagttttggcaaggaggatattgaaaatagagatcatttattaaggctatatccgcaccttcagatcgcgtatatcgatgaagagtacgatccagataacggtaaaaagacatactattctgccctcatcgatggccattgtgagatattagaaagtgggcaacggaaacccagatatagaatacgtctttctggaaatccaattcttggtgacggtaaatctgataatcaaaatcatgcaatcatttttgggcgtggtgagtacattcaattggtagatgctaatcaagataactatctcgaggagtgtttgaaaattaaaagtgtcttgaaagagtttgaatacgattccaattttttaccgaccgatgtggagggttccaattcacctcctgttgcgatcgtaggtacccgtgagtatatcttttcagaaaaaattggagtgttggaagatatagctgcaggcaaggagcaggtgtttggcacattattcgctcgcactttatcctatctcggtggcaaattgcattatggacatccagatttcctaaatgttgcatttttaactactagaggtggtgtctccaaagcacaaaagggattacatctaaacgaagatatttacactggtatggattctgttatgagaggcggtattatcaaacactgcgaatataatcagtgtggcaagggccgtgatttaggttttggatctattttaaatttcacgactaaaattggagctggtatgggtgagcaacttttatcccgtgaatactactattttggtacgttactaccattggacagatttttgactttttactacgcacatcccggatttcatttgaataatgtgctcatcatgttttcaatcaagttattcattattttcatgataaatttggctgttttgattcacgaatccgtattatgccagtacaattcccaacttgaaattatagagccgagaataccaatgggttgtgttaatttgatttcagtggttttttggttacgacgttcaattttaagcatactagcagtctcttccatctcttttttcccattattcgtccaagaattatctgactcaggagcgcagaaagcagtaactagaatcgtaaaacattttttctcattggcacctatatttgaagtttttgtttgtaaagtatttgctggttctttggtgaatgatttactatacggaggtgcaagatatatctctactggacgaacttattcaaccgttcgagttccctttgcttctttgtattcaagattcgcaccagaaactttttatttttcaacaagctttattttgttgctactttactcgtccatggtaatatgggatccttcttttttatatttctggttcacaattgtatcattattgatttcgccctttatttttaaccccaatcaattcatgtggagcgactttcttgtggattacagagaatacttgagatggctgttccgaattgacaccaatccaaataatttggcatggaaaggctttgttaggggttttggaacagatgcgatgggcaaaaaaactaggagactactgaaatttggaaatcggttaaactctgatttgaaaagacccactcttcagggtaggttgttctcagatgttttaccggatttcctgtttacgattttggtgttgataccgtttttatttttaggttaccaggcccaaaatccaagtcatgaattttccaatccactactccgtgtagcaatcgtctctatacttccaatagcatgcaattcggtcatgctgttggc

SEQ ID NO: 112 - DNA, 3409 bp, Scedosporium prolificans
tcgcttcatgccagagtgcctttgcttcatctttaagtgcgccgacgactaccttaactcacccgcctgccaaaatttggttgagccagtagaggaattcacctatttgaacaacgtgattacacccttataccagtacatccgagatcaatgctatgagatcctggatggtgtatacgttcgccgcgagaaagatcacaaccagacaatcggttatgacgactgcaaccagctattctggtatcctgaaggcatcgagaggattgtgatggaagacaagacgcgtcttgttgatatccctccggccgaacgctatctcaaactgaaggatgtcgtttggaagaagtgttttttcaagacatacaaggagactcgatcatggttccacctccttgtcaacttcaatcggatctggatcatccatttgacgatgttttggttctacacttcgcataatgctcctagtctcgttcttggaagcgcgtacaaacaacgggagaataaccaacctccagcatcaaagcaatggtcggttgttgctataggtggagctattgccgcgttgatccagatcttggcgacattggctgagtgggcatacgtaccacgccgatgggctggcgcgcaacatttgacgaagaggctcctcttcttgatcgttatattcgtcatcaacgtggccccgagcgtctatattttcgggttcaaggaaccgattttgaaggagaacattgccaaaatacttggcatagttcaattcttcatcgcccttgctacatttcttttcttctccgtcatgcccctgggaggcctctttggcagctacttgacaaagaactcacgcagatatgttgccagccaaactttcacggcgagctacccgcgactgagaggtaatgatatggcgatgtcgtatggactgtggcttatcgtcttcggaatcaaatttggagtatcctacgcctacttgacactatcgttcagagatcccatccgatacctctccatcatggatattcagtgtcatggtgatgctctatttgggaaggtactctgcgaaaaccagccctccattcttcttggcctcatggcatttaccgatctcttatttttcttcctggatacttatctcttctacgtgctggcaaatacactcttttcattcgctcgatcgttttacctgggatcgtcactgtggaccccttggcgaaacgtctacgctcggctcccaaagcgtatttattcgaaaattcttgcgacgacagacatggaaatcaaatacaagccgaaagtactcatttcacagatctggaatgccatcgttatctcaatgtaccgtgagcatttgttagcgatcgaccatgtccagaagctcctatatcatcaggtaccgtcagagcaggagggaaagcgaactttgcgggctcccacgttcttcgtctcccaagaggatcattcattcaagacggagttcttccctgcgcatagcgaagccgatcgacgtttatcattttttgcccagtcattatctacccccattccagagccgttacctgtggacaatatgcccacgttcaccgttcttattcctcactatagcgaaaagatacttctttctctcagagagattatccgcgaagatgagccgtattcccgggtcacattgcttgaatatctgaagcagcttcaccctcatgagtgggattgctttgtgaaggacaccaagatacttgccgatgagacatcacagttcaatggcgactatgaaaaaaatgaaaaggactcagcaaaaagcaaaatcgatgaccttcccttctactgcattggtttcaagtcttcggctcccgaatacaccctacgcacgcgtatctgggcgtcactccgttcgcagacactttaccgcacagtatctggcttcatgaactatagtcgggccatcaagcttctttaccgtgtggaaaatccggaagtagtgcaaatgtttggcggaaactcggataaactagaaagggaattggaacgcatggccagacgcaagttcaagctatgcatctcaatgcaacggtacgccaagtttaagaaagaagagatggagaacgctgaattcctgcttcgtgcgtaccctgacctacaaatcgcttacctggatgaggaaccgccgcttgtagaaggggaggagccccgtatctactcggcactcatcgacggtcactccgagatcatggaaaatggcatgaggcgcccgaaattccgcattcaactttctggcaaccctgtccttggtgacggcaagtcggacaaccaaaatcactcattaatcttttaccgtggcgagtacattcagcttattgacgccaaccaagataattacttggaagaatgcttgaaaattcgaagtgtcttggccgagtttgaagagatgaaggttgagaacgtttcgccatacacccctggtgtcaaaaacccaatgacctcgcccgtggccatcctgggcgcccgcgaatacattttttccgagaatatcggtattctcggtgacgtcgccgcaggaaaggaacagacattcggtacattgtttgctcgtaccctcgctcagattggcggcaaacttcattacggtcatccagatatcctcaatggcattttcatgaccaccagaggtggtgtttccaaggcccagaagggcttgcacctgaatgaggatatctatgctggtatgaatgctgtgcttcgaggcggtaggatcaagcactgtgaatattaccaatgtggcaaaggtcgtgatctcggattcggctccattctcaacttcacgaccaagatcggcacaggcatgggtgaacagatgctctcccgtgagtattattacctaggtacacagcttcctcttgacaggttcctctcgttctactatgcccacgctggattccacatcaacaacatgtttatcatgttatccgtacaaatgttcatgcttactctcctgaatttgggtgccttaaggcacgagacgataccctgcaactacaatcgggacgtacccatcacggatgccctcctacccaccggatgtgccaacactgatgccttgaccgattgggtgtaccgctgtgttttttccatcttcttcgttgccttcttggctttcatccctctggtagttcaggagatgacggaacgcggtttctggcgagcggcaacgcgtctggctaagcaactgttttcgttctcgttgttcttcgaagtttttgtcacgcaaatttatgccaattccgtccagcaagacctctcattcggcggtgcccgctatatcggtacgggccgtggatttgctaccgcacgcattccgtttggggtcttgtactcgagattcgcgggtccatccatctacttcggcgcaagattgttc

SEQ ID NO: 113 - DNA, 5844 bp, Scheffersomyces stipitis
atcgtcgaatagcaattatagattaagatgtcgtatagcgataataatcataattattatgatcccaaccagcagggcgctcctgctggtgacggatactaccaacaacagccctacgatgaaggtcagcaacagcaggatttctatgatccaaactctcagtaccatcagcagccatatgacatggaaggctaccaggatcctaacggagctccatatggcggccagccaatgcatcctcagggaggctacaatgctgatccagaagccttttctgatttcagctatggtggtcaaaccccaggcactcctggctacgaccaatatggaactcaatatacgccttctcagatgagctatggcggtgacccaagatcgtctggtgcctccacacctatatacggcggccagggtcaaggctatgatccaacacagtttcagatgtcgtcgaacttgccttatcctgcctggtcagctgacccacaggctccaatcaaggttgagcacattgaagatatcttcattgacttgaccaacaagtttgggttccagagagattctatgagaaacatgtttgactatttcatgacgctcttggactcgagatcttcgcgtatgtcgccagcacaggctcttttgagtttgcatgccgattatatcggtggggaaaacgccaactacagaaagtggttcttcgcctcgcaacaggacttggacgattcgcttggttttgccaacatgaatttgggtaaaatcggcaaaaaggccagaaaggcttctaaaaagtccaagaaggccagaaaggctgctgaagaacacggtgaagatatcgacgccttggccaacgagttggaaggcgactattctttagaagctgctgagatcagatggaaggccaagatgaactcattgagtccagaagaaagagtccgtgacatttcgctttatttgttattgtggggtgaagctaaccaggttcgttttactccagaaaccttgtgttacatctacaagacagctaaggactacttgttgtcaccagcctgccaacagagacaggaaccagtaccagagggtgactacttgaaccgtgtcattactcctttgtaccgtttcctcagatcgcaagtttatgaaatctacgaaggtagattcgtaaagcgtgaaaaggaccacaacaaaattattggctacgatgacgtcaaccagttgttctggtaccctgaaggtatttccagaatcatgtttgaagatggtacgagattggtagatattcctcaggaagaacgttacttgaagttgggcgaagtcgaatggagcaatgtcttcttcaagacctataaagaaatcagaacctggttgcatttcgtcactaacttcaacagaatctggattatacacggaaccgtctactggatgtacactgcctacaactcgcctacattatacactcaacactacattcaaaccaaagacccacaaccaacagcttcttccagatgggctgctgctgctattggaggtgttattgcttcggctatccagattcttgctaccatcttcgaatggatgtttgtccctagggaatgggccggtgctcaacatttgactcgtcgtttgttgtttttgcttttgatcttctttctcaacttggctcctgttgtgttcaccttctactgggctggtttatctgcaatttcaaagactgctcatgttttgtcgattgtgggctttttcattgccattgctaccttggtatttttcgctgttatgccattaggaggattgttcacctcctacatgaacaaaagatccagaagatatttgtcttcgcaagctttcactgccaacttcattaaattgagaggcttggacatgtggatgtcttacttgttatgggtattggtattccttgcaaagttgcttgaatcgtatttcttcttgaccttgtcgttgagagaccctatcagaatcttatctaccatgaccatgagatgtactggtgaagtctggttcaaggacaagttgtgcaaacaccaggctaagattgtcttgggcttgatgtatctcgtagacttattattattcttcttggatacctacatgtggtacatcatctgtaactgtgttttttccattggtcgttccttctacttgggtatttccatcttgactccttggagaaatatcttcaccagattgcccaagagaatctactcgaagatcttggccactacagagatggaaattaagtacaagcctaaggtgttgatctcgcagatttggaatgctattgttatttccatgtacagagagcacttgttagctatagatcatgtccagaagttattgtaccaccaggttccttctgaaattgaaggcaagagaaccttgagagctcctactttctttgtcagtcaggatgacaacaactttgagacagaattctttcctcgtaactctgaagccgaaagaagaatttcgttctttgcccagtcgttggctactcctatccctgaacctttgccagtcgacaacatgccaagttttacagttttcacacctcactattcggaaaagatcttgttgtctttaagagaaatcatcagagaagacgaccagtactcgagagttaccttattggaatacttgaaacagttacatcctgtcgaatgggagtgttttgtcaatgatacaaagatattggcggaagaaacagctgcttatgaaaatggggatgacgctgagaagttgtctgaaaatggtttgaagtccaagattgacgacttgccattttattgtattggtttcaagtctgctgctccggaatataccttgagaactagaatctgggcctcattgagatcgcaaacattgtacagaactgtttctggtttcatgaactacgccagagcaatcaagttattgtacagagtggaaaatccagagttagtacaatactttggaggagatccagaaggtttagagttagctttggaaaagatggccagaagaaagtttagattcttggtttcgatgcaaagattgtccaagttcaaggacgatgaaatggaaaatgctgaatttttgttgcgtgcttatcccgacttgcaaatcgcctacttggacgaggagcctcctttgaacgaagaagaagaaccaagagtgtactccgctttgatggacggccactgtgagatgttggaaaacggcagaagacgccctaagtttagagtgcaattgtctggtaatcctatcttgggtgacggtaaatctgataaccagaatcacgcaatcatcttccacagaggtgagtacattcagttgatcgatgctaaccaggacaactacttggaagagtgtttgaagatcagatctgttttggccgagttcgaagaattgaatgtagagtacgtaaacccatacgctcccaacttgaagtccgacgaatccaagaagaaggaccccgtagccatattgggtgctagagagtacattttctccgagaactcaggtgtgttaggtgatgttgctgctggtaaggaacagactttcggtactttgttcgccagaaccttggctcagattggtggtaaattgcattatggtcatcctgatttcttgaatgctaccttcatgtttaccagaggtggtgtttcgaaggcccaaaagggtttgcatttgaacgaagatatctacgctggtatgactgccatgttgagaggtggtaagatcaagcactgtgagtactaccagtgtggtaaaggtagagatatgggtttcggatccatcttgaatttcaccaccaagattggtgctggtatgggtgaacagatgttgtcgagagaatattactatttatctactcagttgccattggaccggttcttgtcattttactatggacatccaggtttccacattaacaatcttttcattcagttgtctttgcaagttttcattttggtattggccaacttgagttctttggcccacgaatcgatcatatgttactacaacagagactctcctatcaccgacatcatgttcccattcggctgttacaacttgtctccagctgttgactggaccagacgttatacattgtcaattttcattgtctttttcatttccttcattcctttggttgtgcaagaattgatcgaaagaggtgtctggaaggcattccaaagattcgttcgccactttatctcattgtcaccaatgttcgaagtcttcgttgcccaaatctactcttcctcggttttcactgatttgactgtaggtggtgctaggtatatttctacaggtagagggtttgcaacttccagaattccattctcgattttgtactctcgtttcgctgactcttccatctatatgggtgccagattgatgttgatcttgttgtttggctctgttgcacactggcaggttccattgttatggttctgggcctcattgtcttctttgatgttctcgccatttgtattcaacccccatcaattcgcctgggaagacttcttcattgactaccgtgacttcattagatggttgtcgagaggtaacaccaagtggcacagaaactcgtggattggatatgtcagactttcaagatcgcgtgttaccggtttcaagcgtaaattaactggtgacgtgtctgaaaaggatgctggtgacgcttcgagggctcacagatccaatatcttgtttgctgacttcatcccaactcttatctataccgctggtcttttcgtcgcctacacctttattaatgctcaaactggtgttactaaatactcatttgacgttgacggttcaaaagacgtcctgcctgtcaactctacccttagagttgtcatctgtgctttggctccagtggttattgacatgggtatcttggccgtctgcgttggattggcttgttgtgctggtcctttattgggaatgtgctgcaagaagacaggtgctgtcattgctggggttgcacacggtggtgctgtcattgttcacattgtcttcttcatcgtgatgtgggtattggaaggttttgtatttgccagaatgttattgggttttgctactatgatctatattcagagactattgttcaaattcttgaccttgtgcttcttgaccagagaatttaaacacgacaaagccaacaccgctttctggactggtaagtggtacggtactggtatgggctggatggcattcactcaaccagctcgtgaattctgtgctaagatcattgaaatgtctgagtttgcgggcgacttcgtcttggctcatatcatattgttctgccaattgcctattttgttcattccattagttgatagatggcactctacgatgttattctggttgaagccttccaggttgattagacctccaatctactctttgaagcaagcaagattgagaaagagaatggtcagaaaatactgttctttgtactttttgattttggttatcttcgttgttattattgcagctccagctgttgcaggcctgaagcttcctaaatcgctcggtactaatatagatatttcatttgccaagggtttgttccaaccaagaaaggttgacaacaatgacacaggtccaaacagaccaaaacattacacttggccagcatatttgtccaacaagagtcaggcaactcacaattacaccactaaggccttttagatcatcccacaaattggaaaagtcaatcattttggtgatgttaattgaccgattactgctacattattttcaccaattacttgagtgtgtatttatacaacttttatatacttttgtttacatttgaattcaggtttattttacgat

SEQ ID NO: 114 - DNA, 5484 bp, Schizosaccharomyces japonicus
atggcctataacggcagagaacgagagtacgacgatcaaagctatcactctgggcaaaattggacgagtgagttgacagcagtcgaaagtcctttcgaaaatgctgagacttatgatcctgaagcgcatcgtcgcgagtcagtggatccttttgcccatgattatgatgaatataaccgtagcgacaacgatgaggactttgatgagcttgaggacgatctaatgaacccggacggctacacgtcgcaagaaggttttacttcgcaagactccaacgtgtctaaccgaagctatgtcatgtttcccctcaaccgcggccaaccattgtcaaagcgttatgaatctgttggcttagacgagtttggacacgagtacatcgtggagggatcgagtgttgattcttcggacagtgctggtcactatgaagcgttgtatccctcgtggacggctgaaacaaacgcgccggtgctgacgcaagacatagaaagtatctttatcgagttctcatcaaagttcggtttccaatgggatagcatgcgcaacatgttcgattacttcatggttatgttggactctcgtgcatcgagaatggcaccgagggatgctcttgcaaccttgcatgctgattacattggtggacccaatgcaaactttaaaaagtggtactttgcagctggcatggaccgcctcgacttgacttccggatcaccttctttcatcagtcaggattcttccggggttatcgcgaaggacgacctcaaatcctacgagaacttatggtacaatcgcatggaagagttaactgatgttgagcgtgttgagcagttgtcattgtacatgctttgctggggtgaagcaaacaacgtgagattcatgcccgaatgtctttgtttcatttataagtgcgcttacgattatttcttatctgcggagtacaaacataagaaggacagtgctcctcaggatttctatcttgatcactgcattacacctatatatcaactgcttcatgatgagcagttcgaaatagtcaatggcaagtttactcgccgggagcgtgaccatgctaaaattattggttacgacgatgtcaaccaaacgttttggtacatgcgcggtattcgagggataaagctttttgatggaacttgtttgatcgacgcaccggctccggcgcgtttccacatgctgtatagagttgactggcggcagtctgtccataagtcattccgtgaaattcggagtctcactcacttcattgttaactttactcgcatttgggttttgcatctctctatcttttggtatttcattgcttataattccccgactatgtacacgaagaattatcatcatttgctttatactcagcctgcccctgctgcccggtggacagcttgtggtattgccggagcggttgcttcattcattgtgttcgtatcccttcttttggaatcggtgtttgttccgagaacagctccgggtactcaaagtgttttccctcgtcttttgttcatgcttattttaatggcagtgaacattgcaccggctgtatacattcttggttactgtaatttgacagaacagtatgagagcactgcgaagtctatatcccatgctcacttttggttttcaattgtgtgtgttttgtacttatcattcgtcccgcaatcctctttgctgggttcacgctactggaaaagctcgagaaagtatctcgcacacaagtacttcactgcaagctatgtaaagcttccctttcacagatggtgtatctctgcagccctttggactattgtcttcggtgcgaagtttgtggaatcttacttcttcttaacactttcagcgaaggatccaattcgtttcttgcacaccatgaagccatactattgttatgattacattattggtgatgctttgtgtaagcatcagccaagattcattcttgctcttgtatatattactgaattagttctgttcttcttggattcctatctttggtacatgttggtatgcactatgtttagtattgcatattcattctatcttggtatcaccatttggacgccttggagttacctctttagtaacattcctagacgaatgtataacaaaattttggctacggatcaccttcctgagttctataaaccaaagatctatattgctcaattgtggaacagcattatcatttctatgtaccgagagcatctcttaaccatggagcatcttaagaagttgcttttccagcccgttgacagcgagcagagcggaaagcgtacttttaagactccatcattcttttttcaatacacggacagggcagcagcaaaaatggattatttccctaagaattctgaggcagagagaagaatttccttttttgcccagtctctaagttgtcgtatgcccgcaacaacttctgttgcggagatgccaactttcacagttctcattccccattatggtgagaaaattcttcttagtttacgtgaaatcattcgtgaacaagatcccatgtctcgtattacgctactggaatatcttaagcaattgtatcccaatgagtgggagtactttgtgcgtgataccaagctgctggcaggtgaaatggatgcagatgaagctacaactctcaaaactgagaagggtaagaagggtggtgtaacggaaaaggttaccgaccttccgttctactgcatcggtttcaaatcaaatgcgccagagtacacacttagaactcgtatttgggcatctttaagaagtcaaactctgtatcgtaccgctagtggtatgatgaattatacccgtgccctgaaattgctttatcgtgtcgagaacccccaattatcggaggagtgcaatggtgaccccgataaagttgattacaagattgagcaaatggctttccgaaaatttagactttgtatttctatgcaaagatatgcaaagttcaaccaggaggaaaatgaaaatgccgaatttatgttgcgtgctcatcctgaacttcaaattgcgtatttggattctgatcccgtaacatcaccggatgaagaaccgcgtttgtatgctacgttgatcaatggtttctgtccatttaaagacggacgtcggttacccaagtaccgtattcggctttccggcaatcctattttgggtgatggtaaagcagacaaccagaacatgtctttgcctttcattcgtggtgagtatcttcaacttattgatgccaatcaggacaactatatcgaggaatgcttgaagattcggagcatgcttgctgaattcgaagagatggaacctcctgcgtgcagtccttattccccggagttaatgagaaaacatccagttgctatgcttggatctcgtgagtatattttctcggagaacagtggtattttgggtgatgttgctgccggtaaggagcaaacattcggtacgctgttttcgagagctcttgcattaattggtggtaaattgcattatggtcatccagatattctgaacacgattttcatgacaactcgaggtggtgtctcaaaggcacaaaagggtttgcatgtcaatgaggatatttacgctggtatgacggttttgcaacgtggtggccagatcaagcattgtgaatacttccaatgtggtaagggtcgtgatttgggtttcggcactattttgaacttcacgactaagattggaacgggtatgggagaacagaccttgtcgcgtgagtactttaatcttggtacgcaacttcctcttcaccgcttgctcgcctttttctatgcacatgctggtttccatttgaataatgtcttcatcatggtctctattcagcttattatgttggttatccttaaccttggtgcaatgtataaggtcgtcacggtttgtcattacacgacttcggatgcgattaacgcggcgttccgtccatctggctgctaccaattgaagccgttgcttgattggcttcgacgctgtattatttcaattttcgttgtattcttcgtcgcgttccttcctcttattactcatgatttggtcgataagggagcaccccatgccatcctgttttttacaaagcaaatctgctcactgtcccccatgtttgaggtgtttgtcactcaaatttatgctcagtctatcatcacaaacttttcttatggtggtgctagatatattgcaactggtcgtggtttcgctacaacgcgtgttccgttctcgacattgtattccagatttgcggctccttccatttatgttggtacgagaatgttgttaatgcttctttttggtactttgacagtttggaccgcacattatatctatttctggattacattgtacgcgctctgtgtgtcacctttcatttacaatcctcaccaattcgcctggactgacttctttgttgattatcgtgaatttatgcgttggcttactcggggtaacacgaagtctcacagcaactcgtggattgctttctgtcaactcacacgtacgcgaattactggtttccggcgtcaaatcaaaggtcgtccctccaacaagattagtatggactcgccacgtgctaaggtctctaacttgttcgtcaacgagctcttccttccagcttgtgccgtattctttacgttggccccctatgttttcatgaactctcaacctggaaaccctgatcccgagaagtctgtcaattcgtttattcgtatttttatcatgtcgggtattcctgttgctgctagtgctgcgtcagcaattatcttttccactttatctctctgttgtggtcccctctttagaaaacgtatgagaagttacggtagtttgatggctgcttttgcccatgccgtatccatcgttgcgctgttcttcacgtttgaggctttatggtttttggaggcctggtcgttttctaaaacggttctgggttgtattgttatcatgactattgagcgtttcttctttaaggtcgtaactatttttatgcttactcgtgatcagggtgatgacaatgcgaatctgtcctggtggaacggtgactggtttgaacaaaactctgctcatgtttccttcgtgagagtggttcgtgagtttgtttgcaaaacaaccgagctgaatcttttctccacggattttgttttgggtcatatgatcttgttttctcttattccgcttttgctcgttccttacatagacgtttttcattccatgcttttgttttggttgcaacctaagcgccaaattcgtgcgcctatctacacgatgaagcagaatcgtcttcgtcgtttgattttcttccggtattcatttgtcttcctcttgatattggccttcttcgttgcagccattatcgtccccttcattcttgacaaccagttgtcctattcgtttacgctcgataagtctaaaggcttcggtcgtcttatgcagccttccgatcaagactggtcagcgtacattggaaacaaaaacacatctgcatag

SEQ ID NO: 115 - DNA, 5481 bp, Schizosaccharomyces pombe
atggattataaaaagggtgagcattcgccatcttcttctattcaaatccttagcgatgatgctaccataaattccaattacgcttatggtgagcaattacagtctaatgatcagtataacaacatccaacaccctgctccttcttttgcgaatccattcattcatgaacaagatgattcttattctgatattctagaagaagagccagatgaggatgcttatgattcacctgagagacctagctcaaccgaagaatttatttcacaagacgaatccaatatttctgctggaagttcttttatgttcccttacaatcgaggtcatccattgtccaagcgacacgattcgattatggtagacgagtttggacacgaatacatcgtagaaggtgatagtattgcttctgctgatgaagctattgactatgatgccttgtatgcctcatggactgctgaaaccaaggctcctatactcgccattgatatagaaaatatttatatcgaacttgctatgaaattcggattccaatgggataatatgagaaatatgtttgattatttgatggttatgcttgattcacgtgcgtctcgtatgacacctcaggaagctttacttactcttcatgctgattacattggcggtcctcaaagtaactttaaaaagtggtattttgcatgtaaaatggaccaattcgatttaaagtctggagtcctgagtttcatttctcgtgatccttctacacaagtcccatataaagacatgtcttcttgcgaggcactttggatatcgcgaatggatgaactttcaaattatgagcgtatcgagcaattagccctttatcttctttgttggggtgaggcaaacaatgtgaggtttatgccagaatgcctgtgttttatatacaaggtggcatatgactatcttatttcaccgtcttttaaggagcagaaaaaccctgctccaaaagattattttctggataattgtatcactcccttatataatttgatgcatgatcagcagtatgaaatacgtgatcaaaaatatgttagaaaagagaaagaccatgcctctattatcggttatgacgatattaaccagatgttttggtattcaaaaggtcttaaagcattattattatcagacggatctagaattatggacgccgatgttgccagtcgttactttcttttagctgatattcaatggcaacgagtttgctataaatcatttcgtgagtcacgtacttggcttcatttccttcataatttcagccgaatttggattttgcacatatccgttttttggtatttcactgtctataattctcccaccatctatactccaaattttcattacttggagggcactcagcctgcaagggctgctaaatggtgtgctcctgctttagctggtgctgtcgcttctttcatatcctttttagctttaatacttgaggcatattttgttccaaggaacaaccccggtgctcaacctgttatccctcgacttatattcgtctcaatattgattgctttgaacattgttccagctgcgtttatttttgggttttcgaatgcaacccaacaacattaccgaagtagagaaattgtcggttatgttcatttcttcttttccattggatgtgttgcttatcaatcatttattccactcccattcttacttggtccacggtttaaatttaggtctagttctagaaaatacttagcaaattcttattttacaaacgatatcgccagtcttccttgggggaggactttgttatccgcagctctttggatcactgttttcatcgcgaagtttgtggaatcttattacttcttaactttgtctgttcgtgatccgattcgttttttgcaaagaatgaagccgtacgattgttatgactttatgattggagcaagtctttgtagccatcagcctaaattcttattatctcttgtctacttgaccgatctcgtcttgtttttccttgatacatacttgtggtacatgctaattagcactatgtttagcattgcgtattcattttatatgggatcagctatatggactccttggcgtgttatattttctaatttaccgcgtagaatttattttaccttactggcttataaagacctttctacggaattcaaaccgaaaatatatgttggtcaaatatggaacagtattatgatttcaatgtatcgtgagcatcttctttctttggaacatttgaaaggattattgtaccaacaggtcggctccgaatatttcgggaagcaaacttttcaatctcccaaattcttcatggaggctgccaaaggtttaaacaaatgggatgccttttttcgtcgcaattctgaagctgagcgtagaatttctttttttgcccaatcactgggtgggaaaattccagacgccgttcctgttcctaagatgccttcttttactgttttgattcctcactatggagagaaaatcctgcttagtttacgggagattattcgtgaacaagatccgatgtcacgtattaccctactagagtatttgaaacaactttaccccaacgactgggataattttgtacaagacactaaactaatggctggcgatgttggagttgaagaaactaaatccgatgttaaatctgagaagggaaaaaagcaaggtaccgtcaaagaagatttgcctttttactgtattggttttaaatctacagcccctgaatacactcttcgtactcgtatttgggcatcacttcgcagccaaacgttataccgtactgctagtggaatgatgaattattctcgtgctcttaaactattgtatcgcgttgaacaacctaatctacttgatgattgtgatggaaactttgagagattagaacatcaattagagcaaatggcttatcgaaaatttcgactttgtatctctatgcagcgttatgcaaaatttaatagagatgagtatgagaatgctgagtttttactacgtgcacatcctgaacttcaaattgcctatcttgaccaagatccgtccgaggatggcgaagagccaaaggtttatgctacattgataaatggtttttgtccctttgaaaacggtcgccgtcttccaaaatatcgtatcagactttctggaaatcctattttgggcgatggtaaggcagataatcagaatatggctttacccttcgtgcgcggcgagtatctgcaacttattgatgccaatcaagataattacattgaggaatgtatgaagattcgcaacgttctctcagaatttgaggaaatggattgtgctacgttgactccttacactaagaaaggaaatgccagacatccggttgctatgctgggagctcgtgaatatgtcttctctgagaacagtggtattctcggtgatgttgctgctggtaaagaacaaacatttggtactcttttttctagatctttggctctaattggaggaaaacttcactatggtcatcctgattttttaaacacaatttttatgaccactcgtggtggcgtctcgaaagcacaaaagggattgcacgttaatgaagatatttatgctggtatgaccgcactgcaaagaggcggtagaatcaagcattgcgattactttcaatgtggtaaaggtcgtgacttaggttttggaacaattattaactttactaccaaaattggcaccggtatgggagaacaatccctttctcgtgagtacttttatcttggcacacaattacccttttttagaatgttgtcattttactatgctcatgctggtttccatttaaacaatgtgtttattatgatttctatgcagcttcttatgcttgtcttcgttaacttgggagccatgtaccacaccgttgaaatatgtgactatcaagctggagctgctataaacgcctctctttatccacccggttgttatatgttgaaacctgttctggactggattcgacgatgcattatctccatttttattgtgttttttatttctttcttaccactggtggttcatgatttacttgaaaaaggtgttattcgtgcggtggctcgtttgtgcaagcagatcttttctttatcccctatgttcgaagtttttgttactcaaaattatgcaaactcaatatttaccaacttgacttatggtggtgctagatatattgctactggccgtggacttgctactactcgtgttcctttttctgtgctttattctctttacacaggatcttcaatatatttaggctcgaggttgataatgatgcttctttttggaacaatgactgtttggactactcattatgtttatttctgggttaccatgtttgctcttgttatttgtccatttatatacaatccacatcaattttcgtttgttgacttttttgtagattacagagagtttttgagatggctttctagaggcaacactaaaggtcacgctcattcgtggattggcttttgtagattagctcgtactcgcatcaccggtgttaatagaaaagtgaaaggaagcccgtccaataagctcaccatggacatgcctcgtgctggcttaagaaatgttatttttaccgaggtatttttacctgcgtgctttgcgttttttactatatgtgcttatactttcatgaattctcaacctggtttggaagataaatcaagagctgtaaatgggtttatccgaatttggataatggcggcactgcccatagctattagtactgctgccttattaatcttattaatgttttcctgcatgttgggccctttgttaagaaaatgctcaaagcgttatggggcagttttggctgctttggctcatgctgtatcagtttttggtctcgttttcacctttgaagctttgtggtttttggaagcgtggtcattttcaaagactgttttgggttgcattgtaatatttgctattcatagacttgtttttaaacttgtcgttgtttttctgcttcctcgagaagttgctagcggagaaaacaattacagttggtgggatggacattggtttggtcgcaaaggaataccttatatgcctattcaatttatccgtgagttcatgtgtaaagttgttgagatgaatttatttgctatggactttatcctttctcattgcattttgttttcattaacgccgattctttgtatcccgtttatcgatattcctcattcagttttattattttggttacaccccagtcgtcaaattcggccacctatttatactcggaagcagaatcagttacgaagacgcacgttctaccgttattctttattattctttgctttattatgtacattcgttgctatgattgtcgttcccttagttcttgatcaaaaactgagctatcaatttaagtttgaaaactctgtcaagttctttaggcttatgcagccatctttgggagttttaccaaacactaacaaaaatacatccgaataa

SEQ ID NO: 116 - DNA, 5868 bp, Schizosaccharomyces pombe
atgtctggaaataatgaaaatgtttcaggtattactggtcatgatgctgtctcggatgatcagtacgcttacgattcagaggtttatgatgaccaaaatgcataccaacgccagcctgctgatgcgtattccaatgaggagtttttggatcaggctgactacgattctatgtatggagagggttacaatgggtatgattaccctactggtgtaactgaaagttatggagatgaatacactcctgtcgacaccgcctcttcaggtatcaatcaatattccactgaaaaaggaaaatttactcgtccttcagatgaatacgagtctgagtattcagattacaatgctcagccctcagatgccaacaatttttacaatttgagaggcgatggtagatacaacgcttatgatcctagttccgattcgttggctaacgtctacaacagtgtgccttacggtagcagtccgtatgattttagcaactcttcttttgttggtaattcgggctcaggtaccccattggatggcgatagtggttcattctatgccgatagcgctaatctcacaaatcgtgagccttatcctgcctggactcctgaaaacgaactccctttaactaaggaagagattgaagacatattcattgatctaaccaataaattgggtttccaacgcgattccatgcgtaatatgtatgatttttttatgtgtcttttagattctcgtgcttctcgcatgactccagatcaagcactgcttacgcttcatgccgattatattggtagtgatattgctaactataaaaaatggtattttgcttctcagatggatcgggaagatgcagtcggtcttgctaatgttggcatttatggtggtaaagttacttctatcaaagagaaaggaaagttcttttctcgaaacaaaaaagcccctaaagttgttaagcctccaaggaagtctcgcttcaagcgcaagaagaaaaaggagcaacccgaggaggcggaagacgaatacattgatgttaataccgatgattctttagaatccgccgaatatcgttggagatctcacatgcgctcaatgactcaattcgagcgtgctcaacaaattgcattgtggcttttgttgtggggtgaggcaaacaatgttcgtttcatgcctgaggtaatagccttccttttcaaatgtgcttacgattatattatttcacctgaggcacaaaacgtcactgaaccagttcctgaaggatattacttggataatattgtttccccactctaccaatatatgcacgatcagcagtttgaaattatcaatgggaaatatgtacgtcgggaacgtccacatgaccagttaattggatacgatgatattaaccaacttttctggcatgctgagggtatagcacgtcttatttttgaagacggcactcgtcttattgatattcctgcttctgagcgttttcataggcttccagaagttcaatggaatcgtgctttttataaaacttattatgaatcccgttcttggtttcatcttattaccaatttcaatcgtatttgggtcatccactttggtatgttttggtattttactgctttcaactctcctactctttacacaaaacctttccatcagcgcgatggtcccaagccaacaggtgcttcccaatgggctgctgttgcttgtacctctgttgtttcttgtattatcatggctgctgcttctttgtgtgaatatctttttgtcccccgtcgtttccctggatcaaaacccatttggaagcgtttatgtatcattgttttaatcgctatcattaacttgattcctatcgtctatatcttcggtttctcaagtaagcatcaacagcgtagtggtcgacgtatcgctgttggtgtagttgcatttttgatgtctattgctacatacgtctacttttctcttgtacctctacaaagtacatttggaaaattgtccgtgaaagattctcgtaaatacttggcaaacaagtatttcacttcaaattttgcaccattaaaatttgataaccaagcactctctgttattatttgggtctgtgttttcacatgcaaatttgctgaatcttatttcttccttaccttgtctatcagagatcctattattgttttgagtaccatgcgaccttatctttgctctatttattgggcgggtagcagattatgttttgtccaaccaaggatcattttgggtatcatgtattttactgacttgattctcttctttttggatacgtacctttggtatattattttcaatactatcttctctgttttaagatcattcgtcttaggtatttcgatcctcacaccatggagaaatatctttagccgtatgccccaaagaatttatggtaaaattttggccacgaatgacatggaaattaagtacaaacctaaaattttaatttcacaaatttggaatgcgattgtcatttctatgtatcgtgaacatttactttccattgatcatgtacaacgtcttctgtatcatcaagttccagctgaagaaggacgtaggactcttagaacccctacgttttttgtctctcaggacgataatattgttcacactactttcttccctgcaaattcagaggcagagcgtcgtctttctttctttgcacaatctttagctactcccattccagaaccagtacctgttgacaacatgcctactttcactgtattgattcctcattatgctgagaaaattcttctatcattgcgagaaatcattagagaagaggaccagttgtctcgtgtcacccttttagaatatttgaaacagcttcatcctgttgaatgggactgttttgtgaaggatactaagattctggtagaggaaaatgctccatatgaaaatgattctgtctctgaaaaggaaggtacatataaaagtaaagttgatgatcttcctttttactgtattggtttcaaatctgctatgcccgagtatacgttacgtacccgtatttgggcttccttaagaagtcaaacgttgtatcgtactatcagcggttttatgaactatagcagagctatcaagcttttatatcgtgttgaaaaccccgaaatcgttcaaatgtttggtggtaacacagatcgtttggaaagggagttagatcgcatggctcgtcgaaaattcaagttggttgtctcaatgcaacgttatgcaaagttcacaaaggaagagtatgaaaatgccgaatttcttctcagggcttatcctgatttgcaaattgcttaccttgacgaagatcctcctgaagaagaaggtgcggaacctcaattgtttgctgctttgattgacggtcactctgaaattatggaaaatgaacgtcgtcgtccgaaatatcgtattcgtttgtctggtaatcctattcttggtgatggtaaatctgacaatcaaaacatgagcttaccattctatcgtggtgaatatattcaacttattgatgctaatcaagataattatcttgaagagtgccttaagattcgaagtgttcttgctgagtttgaagaaatggagaccgacaatgttaacccctattctgaaagtgctcgtgaaagaaataagcatcctgtagctattcttggtgctcgtgaatacattttctctgagaacattggtatattgggtgacgttgcagcaggcaaagaacaaacattcggtactcttttctctcgtacacttgcgcaaattggcggtaaacttcattatggtcatccagattttcttaacggtatctttatgactacacgtggcggtgtttctaaagctcaaaaaggtttacacgtcaacgaagatatttatgctggtatgaatgctatgcttcgcggtggacgtatcaagcattgcgagtatttccaatgtggtaaaggtcgtgatttaggttttggctcaattttgaatttcaacacaaaagttggtactggtatgggtgaacaaatgttatcccgtgagtattattacttaggtacgcagcttcaacttgaccgtttcctttctttttattttgctcaccccggtttccatcttaacaatatgtttattatgctttctgttcaacttttcatggtggtccttatcaacttaggagcaatttatcacgttgtcactgtttgttattacaacggtaatcaaaagcttagttacgacactagtatcgttccacgtggttgttatcaattgggacccgttttgtcttggctgaagagatgtgttatttcaattttcattgtgttttggatttcgtttattccccttactgtgcatgaattaattgaacgtggtgtttggagagctacaaaaagattcttcaagcaaattggttctttctcccccttgtttgaggtttttacctgccaagtgtactctcaagctattacctcggatcttgcatacggcggtgctagatatattggtactggtcgtggttttgctactgctcgtttacctttctccatcttgtattcacgctttgcagtcccttcaatttacattggagctagatttctaatgatgttgttgtttggtactatgactgtttgggttgcgcacttgatctattggtgggtgtcaatcatggctctttgtgttgctccatttttgttcaatcctcatcaatttgattggaacgatttctttgttgattatagagagtttattcgctggctttcgagaggtaattctcgttctcatgccaattcatggatcggatattgtcgattaacccgcactagaataactggttacaaacgtagggtactaggtcaaccaagcgataaaatttcaatggatactccacgagcaaagtttacgaatgttttctttagcgatgtgttaatccctgccttgttagctgctggtgccattatcccttacttctttatcaattctcagcctggaaatcccatgtttatcactgatccaaataatccaagcccatatgttcatgacacaaagacaggtactaatcccattttgcgacttgttattatctctctcattcctattgcagcaggctttggtatgtcaggtttctttggtggtatggcttgttgtttgggtccagcctttggattgtgctgtaaaaagtttccatctatttttgctgcaattgcccacacgatccaaattttcatcttcattgctatttttgaagtctgctggttccttgatggatggtcattacccaagactgtgttggccttctgtgctgttactgcaattcatcgttttatcttcaaaattttaacactattatgtttatctcgtgaggtcaaacaagatagtgctaatatttcttggtggagtggtaaatggtatggcaaaggatatggctatcatgcctttactttgcctgctcgtgaatttgtctgtaaagccatagaacttaatttgtttgctactgatttcttcttgggtcacttattactgttttttatgcttcctgtgatttgtatcccatatattgatcgttggcattcagttcttcttttctggttgcgcccaagtcgtcaaattcgtcctcctattttctctaccaagcagaatagactgcggaaacgtattgttcgtcgttattcagccttgtacttttcaattttggtaatattccttattcttattattgttccattggcagctggtgcagaaatccgccaaggattaactgcttctgaggctgttgccaagggtgctgttggatggaaccaaactaactcttcaattggtagcggtatcattcaaccaagggacacgaattatactgctaattattctttctggtacgacagataccatttcgaattcaataccacttactag

SEQ ID NO: 117 - DNA, 10711 bp, Schizosaccharomyces pombe
tagatgtaaataaacaaagtcttaagatcatgaaccaaaacgtaaacaaagctggtaaattgaatgcagaagggggattgggacaaatagttttaagatttttgaaaagcaaaagaacttcaataagaattgactaaatttagatatgcaatgtaagaagcaagcttgatttttgtttttctaataccatcgctagctgtttgcctttgctcaattcgactgttgtcctagcaactatgccgggttgtcgttcatttccgaggcacagcattgatagtctcttttatgattgggcaaaacatgccaaaatttttcggatctactttcattgtttacagtgtaagtaaacaaataaattcaaaacaaacaaacaaataatggtcgttggcctggtaactatcgttttgggggaatacagtgactcgcagagcaatgaatctagcactgcgcggtctttcaagcgagaagcctagtaggaactctttggataacaaagcgacattgggaacgtggcaattctgtcgtggtttataaagtgaatcttggtgatttatatcattaacgaatagatgagataaaagagtgtttcatttcaatacactttgtgagaatatgcggaaagctgattcagcctcaaaatttattcgatattaagtactgaaattttctatccaatatcatctagtagatatctttttttttttaattttcatttttcattcagataaaatttatgtcagaaaaaaaaagaaagaaagaaatagcacaagtaaataagaaataatagtttcattttaaaataaaaggataataaaaaaataaaatagaaaagagtgaactgaaggagggaaacaaacaataacaaaataaaaataccatttcaaaattatctgtatacatggttattaaagcaaattgcacaaaagtaaatttgttttttcatctgaattcttttcacagatatatcgttattgttgtattgaaaactcccaaactttactttataaaattaattcattagcattgtactttattttttagtgcaatattgtgaaaaaaatttttgcgttttttctttatcttattatagcctctgttttatttcgtattttctcgctcattttaatattttttcgcaattttgcattccttaacattctcatccattgaatgtacaaggaattctttttcccttagttaaacactcaaatgaattctttgttcttcttctacctctcggttactgtaaacgactgattgagagaatagttagaccaatatttgtttcatcaccccacgatttaattaaaataatacaaagtaaataaaatgatcgtttttacccctgaacatttgaagacaaagagaaaacgaatttggatagacttattggcgcattttctttcgctagctaatgtttcatgatataatttttctaccttttttttttttcatacttacatatcgggtagaagttcttagcttaaaaactaatgcccaaaataacaatgataaaaaattggaattaacaaagtcttgtaggaagacaagggatattggttaactatcgatttttttaatctgttcccgtttaaataataaatttttcttaacagagtcaagtcgaatagtaaaaaaatgcttacaataatcaaaatacttaaaaaacatgcaatgtagaatccatcttaccctaagttacagaaaaaactcagtgttttgtaaacacggaatccccaaagaatataaacccttttttcctattgatgaataagcagcaaacattcaaatattccggctaaaaaaactcttcgaaagacttcgctagtttatcctttccaattgcttagaaaacagtgttagtgtgtttaccgttgtgttctgcattagcggttatccgcccattcagaacggtacgcaagactatcctatgggagccgtatagatttagtaattatacacatctaccattattctattcatttaaataaatttgtaaaatcacataagcattactgtgtatttagttttcgttttccacgacattctatatagtcaggcttaggtcctcaaacccatattgttttgttgttgctgctagtcttctctgacaagagcgcctaccaacagcaaaattccccttcatacctttttcgccgagtattcaaagaagcgctcgcctaaccacttagggagatatttttgagtttgagattgtattaattctgcttaaaagtcatctataattcaccaaagttaacggcggcgtcttgtcttttggttagcatagtccaacatttctgcttgattagacataaatttgcagttttcaattttctttcttttcaaaagactgaaaagtagttgttggtcaatctctttctttttctttctttcttttggattatcccgtataaaaatttaggggttattcttttccattgctcactttatacagtttagcagttggaaatttttttcctttcgtttcaatatcataacttctttcaaagggagcatatagctgtgcctggttgttctccgtcattttacgccaatttttatttcttttgtgtggcttgttttgtcgattaaaaaaagcaatcatttcctcctccactgcattgttttgacattattgaggtttttcttttcttcctcttctttgtgggttcgttctttcttttctattattttattatattttattttaattttcttcgaaaaaggtgtcaacaggggtcttttaatattatatcttgttgactaccttcttgtctaagactgtacatttgttctcagtttggttttgtttcatcataaaaacattttggtgataaaatttttgtttccatcttttttcattgagtattctaggcggtttttgctaggcgcattccggtttcaatatactcacacgtatctatcccaatctttcgtttatattcatttgttggtaacttattcctgcatttgctttgtttttctgttactccttgctgttgaaagtagcctttgcatttcttaacttgaatactgcatagttgatttaaagtccttttctctcttttttcttggtttcatactttctttttgggaaacaagggcttaggtttcattgcatttataactcattatcttttattatttgtaaaaatggattataaaaagggtgagcattcgccatcttcttctattcaaatccttagcgatgatgctaccataaattccaattacgcttatggtgagcaattacagtctaatgatcagtataacaacatccaacaccctgctccttcttttgcgaatccattcattcatgaacaagatgattcttattctgatattctagaagaagagccagatgaggatgcttatgattcacctgagagacctagctcaaccgaagaatttatttcacaagacgaatccaatatttctgctggaagttcttttatgttcccttacaatcgaggtcatccattgtccaagcgacacgattcgattatggtagacgagtttggacacgaatacatcgtagaaggtgatagtattgcttctgctgatgaagctattgactatgatgccttgtatgcctcatggactgctgaaaccaaggctcctatactcgccattgatatagaaaatatttatatcgaacttgctatgaaattcggattccaatgggataatatgagaaatatgtttgattatttgatggttatgcttgattcacgtgcgtctcgtatgacacctcaggaagctttacttactcttcatgctgattacattggcggtcctcaaagtaactttaaaaagtggtattttgcatgtaaaatggaccaattcgatttaaagtctggagtcctgagtttcatttctcgtgatccttctacacaagtcccatataaagacatgtcttcttgcgaggcactttggatatcgcgaatggatgaactttcaaattatgagcgtatcgagcaattagccctttatcttctttgttggggtgaggcaaacaatgtgaggtttatgccagaatgcctgtgttttatatacaaggtggcatatgactatcttatttcaccgtcttttaaggagcagaaaaaccctgctccaaaagattattttctggataattgtatcactcccttatataatttgatgcatgatcagcagtatgaaatacgtgatcaaaaatatgttagaaaagagaaagaccatgcctctattatcggttatgacgatattaaccagatgttttggtattcaaaaggtcttaaagcattattattatcagacggatctagaattatggacgccgatgttgccagtcgttactttcttttagctgatattcaatggcaacgagtttgctataaatcatttcgtgagtcacgtacttggcttcatttccttcataatttcagccgaatttggattttgcacatatccgttttttggtatttcactgtctataattctcccaccatctatactccaaattttcattacttggagggcactcagcctgcaagggctgctaaatggtgtgctcctgctttagctggtgctgtcgcttctttcatatcctttttagctttaatacttgaggcatattttgttccaaggaacaaccccggtgctcaacctgttatccctcgacttatattcgtctcaatattgattgctttgaacattgttccagctgcgtttatttttgggttttcgaatgcaacccaacaacattaccgaagtagagaaattgtcggttatgttcatttcttcttttccattggatgtgttgcttatcaatcatttattccactcccattcttacttggtccacggtttaaatttaggtctagttctagaaaatacttagcaaattcttattttacaaacgatatcgccagtcttccttgggggaggactttgttatccgcagctctttggatcactgttttcatcgcgaagtttgtggaatcttattacttcttaactttgtctgttcgtgatccgattcgttttttgcaaagaatgaagccgtacgattgttatgactttatgattggagcaagtctttgtagccatcagcctaaattcttattatctcttgtctacttgaccgatctcgtcttgtttttccttgatacatacttgtggtacatgctaattagcactatgtttagcattgcgtattcattttatatgggatcagctatatggactccttggcgtgttatattttctaatttaccgcgtagaatttattttaccttactggcttataaagacctttctacggaattcaaaccgaaaatatatgttggtcaaatatggaacagtattatgatttcaatgtatcgtgagcatcttctttctttggaacatttgaaaggattattgtaccaacaggtcggctccgaatatttcgggaagcaaacttttcaatctcccaaattcttcatggaggctgccaaaggtttaaacaaatgggatgccttttttcgtcgcaattctgaagctgagcgtagaatttctttttttgcccaatcactgggtgggaaaattccagacgccgttcctgttcctaagatgccttcttttactgttttgattcctcactatggagagaaaatcctgcttagtttacgggagattattcgtgaacaagatccgatgtcacgtattaccctactagagtatttgaaacaactttaccccaacgactgggataattttgtacaagacactaaactaatggctggcgatgttggagttgaagaaactaaatccgatgttaaatctgagaagggaaaaaagcaaggtaccgtcaaagaagatttgcctttttactgtattggttttaaatctacagcccctgaatacactcttcgtactcgtatttgggcatcacttcgcagccaaacgttataccgtactgctagtggaatgatgaattattctcgtgctcttaaactattgtatcgcgttgaacaacctaatctacttgatgattgtgatggaaactttgagagattagaacatcaattagagcaaatggcttatcgaaaatttcgactttgtatctctatgcagcgttatgcaaaatttaatagagatgagtatgagaatgctgagtttttactacgtgcacatcctgaacttcaaattgcctatcttgaccaagatccgtccgaggatggcgaagagccaaaggtttatgctacattgataaatggtttttgtccctttgaaaacggtcgccgtcttccaaaatatcgtatcagactttctggaaatcctattttgggcgatggtaaggcagataatcagaatatggctttacccttcgtgcgcggcgagtatctgcaacttattgatgccaatcaagataattacattgaggaatgtatgaagattcgcaacgttctctcagaatttgaggaaatggattgtgctacgttgactccttacactaagaaaggaaatgccagacatccggttgctatgctgggagctcgtgaatatgtcttctctgagaacagtggtattctcggtgatgttgctgctggtaaagaacaaacatttggtactcttttttctagatctttggctctaattggaggaaaacttcactatggtcatcctgattttttaaacacaatttttatgaccactcgtggtggcgtctcgaaagcacaaaagggattgcacgttaatgaagatatttatgctggtatgaccgcactgcaaagaggcggtagaatcaagcattgcgattactttcaatgtggtaaaggtcgtgacttaggttttggaacaattattaactttactaccaaaattggcaccggtatgggagaacaatccctttctcgtgagtacttttatcttggcacacaattacccttttttagaatgttgtcattttactatgctcatgctggtttccatttaaacaatgtgtttattatgatttctatgcagcttcttatgcttgtcttcgttaacttgggagccatgtaccacaccgttgaaatatgtgactatcaagctggagctgctataaacgcctctctttatccacccggttgttatatgttgaaacctgttctggactggattcgacgatgcattatctccatttttattgtgttttttatttctttcttaccactggtggttcatgatttacttgaaaaaggtgttattcgtgcggtggctcgtttgtgcaagcagatcttttctttatcccctatgttcgaagtttttgttactcaaaattatgcaaactcaatatttaccaacttgacttatggtggtgctagatatattgctactggccgtggacttgctactactcgtgttcctttttctgtgctttattctctttacacaggatcttcaatatatttaggctcgaggttgataatgatgcttctttttggaacaatgactgtttggactactcattatgtttatttctgggttaccatgtttgctcttgttatttgtccatttatatacaatccacatcaattttcgtttgttgacttttttgtagattacagagagtttttgagatggctttctagaggcaacactaaaggtcacgctcattcgtggattggcttttgtagattagctcgtactcgcatcaccggtgttaatagaaaagtgaaaggaagcccgtccaataagctcaccatggacatgcctcgtgctggcttaagaaatgttatttttaccgaggtatttttacctgcgtgctttgcgttttttactatatgtgcttatactttcatgaattctcaacctggtttggaagataaatcaagagctgtaaatgggtttatccgaatttggataatggcggcactgcccatagctattagtactgctgccttattaatcttattaatgttttcctgcatgttgggccctttgttaagaaaatgctcaaagcgttatggggcagttttggctgctttggctcatgctgtatcagtttttggtctcgttttcacctttgaagctttgtggtttttggaagcgtggtcattttcaaagactgttttgggttgcattgtaatatttgctattcatagacttgtttttaaacttgtcgttgtttttctgcttcctcgagaagttgctagcggagaaaacaattacagttggtgggatggacattggtttggtcgcaaaggaataccttatatgcctattcaatttatccgtgagttcatgtgtaaagttgttgagatgaatttatttgctatggactttatcctttctcattgcattttgttttcattaacgccgattctttgtatcccgtttatcgatattcctcattcagttttattattttggttacaccccagtcgtcaaattcggccacctatttatactcggaagcagaatcagttacgaagacgcacgttctaccgttattctttattattctttgctttattatgtacattcgttgctatgattgtcgttcccttagttcttgatcaaaaactgagctatcaatttaagtttgaaaactctgtcaagttctttaggcttatgcagccatctttgggagttttaccaaacactaacaaaaatacatccgaataaagcacgggttaaaatcaacatttgcttaagccgtgagtttacgttatgatagcattatttttcccgtaaaaaaaaagactgaaggttttcttgattgatatatttaactcttgctttatttggtcattattatggtattggttgttaaataggtttcaaccattaccagattttaaatttttaaaaatatttaggctacgcttttatttctttatacttcctagtcatacttttgcaatggctcatgaggttttgctttatgtgacactatctttatggatttgatgttatatattaaatccagaaaaaaactggtgttgtgaatttgcatgccttgcattttgaatgacttacttgtaaatatttaaacattttatttcccacaatatatgcattattttgttactgctaactaattccatttttatcatttttcaaagatgcttgtgtgtaagtaattgcgcgaaagcaggtttgataaaatagtaaacatatactcccagaaattgtagcgcataatggtagagttttgaaattcagcggtgtaaatgaacgatgatgaccttgtagcaagcaaaatatgtttcaggccctcaagccaaaccaagaacctttgctagctaaccacttcgtcatgttttaaaaatactcgagaaaattattaaatcattatctttgaatggtttgtgccatttaatatgtacatagcgattcccaaaaagtttgctaacaatataacgaaatataagaataagcaagaaacaaagttttagtatccgaatccaaaatgtgactgcttagtttcttgttttatgtacagtgaacgcctccacttaaatttatcaagaacaataaaatgggcaaggttcacggatctctcgctcgtgccggaaaggtatgttgttttactagttttagtttaataaaggtttactaactgtttaaaggtcaaatctcaaacccctaaagtggaaaagcaagaaaagcccaagcaaccaaagggccgtgcttataagcgtcttttatacgtccgccgttttgtaaacgttaccaacatggttggtggaaagagaagaatgaatccttcatcataaatctgaatttttttagagtttctagatgatgactcatttccccttacttcaacttattaaaatggttaaataatggaattgatttttttacaatatttcttcaattaattgtttgatgacaaaaaagttgtttggaaaatgtcgttccattttcgtgtataatggataataaagtggattgttactgtaaatgcaattaagtcattgtactgaaccttaatgactagttcactatagaattgatggtttattacctatatttcgcaatgtagcaacttagttctgtaattaagcttctttgtaaataagactaatggcacttttgttttactgtggcatacaaaggatggtgaacgtttcttgtttcaaattttgtggtgccgaaaattatttattagaacctagacattccaaaccaacgatttcaaatagtaaacattattaaggatgcgtatttgcaaacgtatatctcaagctgtatctttggacaattcagcttccataatgtcagccaaatcatccaactcgttttcattttcagcagattcttctccttttgtagaggagttgggtaaaagatcgtaaccttcatgattatcattctcctttctgcgtttttccccatcataattataactcggctgtatcaagtctgcttttcgtttgataggagtgtttacttctaaagcttctggttgggactgtgaagcagatatagaactaaaaaggcgttagttaatctgggtctatcattctaaaaactcaatgatattaagaaagttcaatgcttacccagtgtcaaaatcattatcatcacttagatcttttaaagcattctcgacatcctgatcagccgcttgccagtcaatttcgtctaactcacggtcattaagttcagaaattctctgctcgtcgtctgaagatgaggaataagaatgttctgataaattcctatctggaagatcataacttggatacaa
